(19) United States
(12) Patent Application Publication
(10) Pub. No.: US 2013/0157258 A1
(43) Pub. Date: Jun. 20, 2013

(54) HCV NS5B PROTEASE MUTANTS

(71) Applicants: Douglas J. Bartels, North Liberty, IA (US); Min Jiang, Lexington, MA (US); Tara Lynn Kieffer, Brookline, MA (US); Olivier Nicolas, Montreal (CA)

(72) Inventors: Douglas J. Bartels, North Liberty, IA (US); Min Jiang, Lexington, MA (US); Tara Lynn Kieffer, Brookline, MA (US); Olivier Nicolas, Montreal (CA)

(73) Assignee: VERTEX PHARMACEUTICALS INCORPORATED, Cambridge, MA (US)

(21) Appl. No.: 13/704,107

(22) PCT Filed: Jun. 15, 2011
(86) PCT No.: PCT/US11/40568

§ 371 Date: Mar. 1, 2013

Related U.S. Application Data
(60) Provisional application No. 61/357,850, filed on Jun. 23, 2010.
(60) Provisional application No. 61/355,014, filed on Jun. 15, 2010.

(51) Int. Cl. C12Q 1/70

(52) U.S. Cl. CPC C12Q 1/707
USPC 435/5; 435/194; 435/188; 530/329; 530/328; 530/327; 530/326; 530/325; 530/324; 530/387.9; 536/23.2; 435/320.1; 435/252.33; 435/325; 435/358; 435/346; 435/254.2; 435/254.21; 435/419; 435/414; 435/412; 435/415

(57) ABSTRACT

The invention provides polypeptides comprising an amino acid sequence comprising at least one variation from wild-type HCV NS5B polymerase, the at least one variation selected from the group consisting of cysteine, isoleucine, valine, or proline at amino acid position 419; alanine, valine, or asparagine at amino acid position 482; valine, isoleucine, threonine, or serine at amino acid position 486; and isoleucine at amino acid position 494, as the amino acid positions are defined in SEQ ID NO: 1, and having Hepatitis C Virus (HCV) NS5B polymerase activity. Polynucleotides encoding the polypeptide, antibodies, host cells, compositions, and methods for detecting an HCV NS5B polymerase having resistance to a polymerase inhibitor also are provided.

### CROSS-REFERENCE TO RELATED APPLICATIONS

[0001] This application claims priority to U.S. Provisional Patent Application No. 61/357,850, filed Jun. 23, 2010, and U.S. Provisional Patent Application No. 61/355,014, filed Jun. 15, 2010, the disclosures of which are incorporated by reference in their entirety.

### TECHNICAL FIELD OF THE INVENTION

[0002] The invention generally relates to Hepatitis C virus NS5B polymerase mutants and uses thereof.

### INCORPORATION BY REFERENCE OF MATERIAL SUBMITTED ELECTRONICALLY

[0003] Incorporated by reference in its entirety is a computer-readable nucleotide/amino acid sequence listing submitted concurrently herewith and identified as follows: ASCII (text) file named “45408B_SeqListing.txt,” 2,592,060 bytes, created on Jun. 14, 2011.

### BACKGROUND OF THE INVENTION

[0004] Infection by hepatitis C virus (“HCV”) is a compelling human medical problem. HCV is recognized as the causative agent for most cases of non-A, non-B hepatitis, with an estimated human sero-prevalence of 3% globally (Alberti et al., J. Hepatology, 31 (Suppl. 1), 17-24 (1999)). Nearly four million individuals may be infected in the United States alone (Alter et al, Gastroenterol. Clin. North Am., 23, 437-455 (1994); Alter, J. Hepatology, 31 (Suppl. 1), 88-91 (1999)).

[0005] Upon first exposure to HCV, only about 20% of infected individuals develop acute clinical hepatitis; others appear not to develop significant outward symptoms of infection. In almost 70% of instances, however, the virus establishes a chronic infection that persists for decades (Iwarson, FEMS Microbiology Reviews, 14, 201-204 (1994); Lavanchy, J. Viral Hepatitis, 6, 35-47 (1999)). This usually results in recurrent and progressively worsening liver inflammation, which often leads to more severe disease states such as cirrhosis and hepatocellular carcinoma (Kew, FEMS Microbiology Reviews, 14, 211-220 (1994); Saito et al., Proc. Natl. Acad. Sci. USA, 87, 6547-6549 (1990)). Unfortunately, there are no broadly effective treatments for the debilitating progression of chronic HCV.

[0006] HCV comprises a single-stranded positive-sense RNA genome encoding a polyprotein of 3010-3033 amino acids, which is co- or post-translationally processed into structural proteins (e.g., core, E1, and E2) and nonstructural (NS) proteins (e.g., NS2, NS3, NS4A, NS4B, NS5A, and NS5B) (Choo et al., Proc. Natl. Acad. Sci. USA, 88, 2451-2455 (1991); Kato et al., Proc. Natl. Acad. Sci. USA, 87, 9524-9528 (1990); Takamizawa et al., J. Virol., 65, 1105-1113 (1991); Choo et al., Science, 244, 359-362 (1989)). Host peptidase first cleaves the polyprotein to release the structural proteins (Hijikata et al., Proc. Natl. Acad. Sci. USA, 88, 5547-5551 (1991); Lin et al., J. Virol., 68, 5063-5073 (1994)). The NS2/3 metalloprotease cleaves at the NS2/NS3 junction. NS3 (with cofactor NS4A) displays serine protease activity and further processes the viral polyprotein to generate the majority of the viral enzymes essential for viral replication and infectivity, including NS4B, NS5A, and NS5B proteins (Bartenschlager et al., J. Virol., 67, 3835-3844 (1993)).

[0007] All nonstructural proteins play a role in HCV replication and/or packaging, and antiviral agents targeting of NS3 protease and NS5B polymerase have shown a great deal of promise in the clinic. NS5B is an RNA-dependent RNA polymerase (RdRp) and terminal transferase, and plays a key role in replication of the viral RNA genome (Lohmann et al., J. Virol., 71, 8416-8428 (1997); Lohmann et al., Virology, 249, 108-118 (1998); Kolykhalov et al., J. Virol., 74(4), 2046-2051 (2000)). The NS5B protein comprises approximately 591 amino acids (65 kDa) having canonical motifs common to other RNA viral polymerases.

[0008] The current standard of care for HCV infection, pegylated interferon alpha in combination with ribavirin, has roughly 40% sustained viral response (SVR) for patients infected with genotype 1, which counts for 70% of chronic hepatitis C patients in developed countries, and 80% SVR in genotype 2 or 3 HCV-infected patients (McHutchison et al., N. Engl. J. Med., 339, 1485-1492 (1998); Davis et al., N. Engl. J. Med., 339, 1493-1499 (1998); McHutchinson et al., N. Engl. J. Med., 361, 580-539 (2009)). Moreover, HCV is prone to developing resistance to antiviral drugs, further complicating development of successful therapeutic regimens.

[0009] Thus, there is a need for more effective anti-HCV therapies, particularly agents that inhibit HCV replication and methods of estimating if HCV therapies will be successful. An understanding of HCV resistance mutants would further progress towards effective HCV treatments.

### SUMMARY OF THE INVENTION

[0010] The invention provides materials and methods that are useful for identifying and improving antiviral therapeutics, including therapeutics for HCV infection; and materials and methods that are useful for diagnosing HCV infection and/or characterizing the strain, genotype, and/or phenotype of HCV, which is useful for selecting a treatment regimen. More specifically, the invention relates to nucleic acids that encode polypeptides with NS5B polymerase activity, and to polypeptides with NS5B polymerase activity, and polynucleotide and polypeptide fragments; to modified versions of each of the foregoing; and to methods of making and methods of using each of the foregoing. In some variations, the polypeptides and polynucleotides of the invention are isolated and/or purified. In some variations of the invention, the polypeptides and polynucleotides have non-naturally occurring modifications, such as attachment of a heterologous signal peptide, tag sequence, or fusion partner to a polypeptide (or attachment of a sequence encoding one or more of these to a polynucleotide); attachment of one or more labels; inclusion of a nucleotide or amino acid that does not naturally occur in HCV polynucleotides or polypeptides; attachment of heterologous expression control sequences to polynucleotides; and mixing in solvents, buffers, pharmaceutical delivery vehicles, or other compositions that are man-made. The invention further relates to antibody substances and that recognize NS5B, and cells that produce such antibodies, and antibody substances modified as described.

[0011] Wild-type NS5B amino acid and polynucleotide sequences are set forth in SEQ ID NO: 1 and SEQ ID NO: 2, respectively. These sequences are referred to herein in the description of the invention. For example, variations of the invention relate to polypeptides and polynucleotides that differ from SEQ ID NO: 1 and SEQ ID NO: 2 at one or more amino acids/codons, as described below in greater detail. The amino acid sequences set forth in SEQ ID NO: 3 and SEQ ID NO: 516 are defined to encompass exemplary polypeptides of the invention. SEQ ID NO: 1 and SEQ ID NO: 2 are NS5B polymerase sequences from HCV genotype 1b, and polypeptide and polynucleotides from other HCV genotypes or subtypes, e.g., HCV genotype 1a, are specifically contemplated as part of the invention.

[0012] In some variations, the invention provides an isolated polypeptide comprising Hepatitis C Virus (HCV) NS5B polymerase activity and comprising an amino acid sequence comprising at least one variation from SEQ ID NO: 1. The variation(s) are selected from the group consisting of cysteine, isoleucine, valine, or proline at amino acid position 419; alanine at amino acid position 423; alanine, threonine, valine, or asparagine at amino acid position 482; valine, isoleucine, threonine, or serine at amino acid position 486; and/or isoleucine at amino acid position 494, as the amino acid positions are defined in SEQ ID NO: 1. The amino acid of a polypeptide that corresponds to a position as defined in SEQ ID NO: 1 is identifiable by aligning the sequence of the polypeptide with the sequence of SEQ ID NO: 1 in a manner that maximizes sequence identity.

[0013] An isolated polypeptide comprising an amino acid sequence at least 90% identical to the amino acid sequence of SEQ ID NO: 3 or at least 90% identical to a portion of SEQ ID NO: 3 having Hepatitis C Virus (HCV) NS5B polymerase activity also is provided. At least one of the amino acids of the polypeptide that correspond to positions 419, 423, 482, 486, and/or 494 of SEQ ID NO: 3 is identical to the corresponding amino acid(s) of SEQ ID NO: 3. The invention further includes an isolated polypeptide comprising an amino acid sequence at least 90% identical to the amino acid sequence of SEQ ID NO: 516 or at least 90% identical to a portion of SEQ ID NO: 516 having Hepatitis C Virus (HCV) NS5B polymerase activity, with the proviso that at least one of the amino acids of the polypeptide that correspond to positions 419, 482, 486, and/or 494 of SEQ ID NO: 516 is identical to the corresponding amino acid(s) of SEQ ID NO: 516.

[0014] Additionally, the invention provides an isolated peptide having no more than 50 amino acids and comprising a sequence of 6-50 amino acids that is at least 90% identical to a portion of the amino acid sequence of SEQ ID NO: 3 encompassing at least one of amino acid residues 419, 423, 482, 486, and 494. When present, at least one of the amino acids of the polypeptide that corresponds to positions 419, 423, 482, 486, and/or 494 of SEQ ID NO: 3 is identical to the corresponding amino acid(s) at the same position of SEQ ID NO: 3. Also included is an isolated peptide having no more than 50 amino acids and comprising a sequence of 6-50 amino acids that is at least 90% identical to a portion of the amino acid sequence of SEQ ID NO: 516 encompassing at least one of amino acid residues 419, 482, 486, and 494, with the proviso that, when present, at least one of the amino acids of the polypeptide that corresponds to positions 419, 482, 486, and/or 494 of SEQ ID NO: 516 is identical to the corresponding amino acid(s) of SEQ ID NO: 516. In some instances, the polypeptide comprises the amino acid sequence of SEQ ID NOs: 4-502.

[0015] Isolated polynucleotides encoding the polypeptides are provided, such as an isolated polynucleotide comprising a nucleotide sequence encoding a polypeptide having Hepatitis C Virus (HCV) NS5B polymerase activity. The nucleotide sequence comprises at least one codon variation from SEQ ID NO: 2, the at least one codon variation from SEQ ID NO: 2 selected from the group consisting of a codon encoding cysteine, isoleucine, valine, or proline at codon 419; a codon encoding alanine at codon 423; a codon encoding alanine, threonine, valine, or asparagine at codon 482; a codon encoding valine, isoleucine, threonine, or serine at codon 486; and a codon encoding isoleucine at codon 494, as the codon positions are defined in SEQ ID NO: 2. In various aspects of the invention, the nucleotide sequence comprises a codon encoding a methionine at codon position 423 as defined in SEQ ID NO: 2. The invention further provides an isolated polynucleotide comprising no more than 50 nucleotides and comprising a nucleotide sequence of 14-50 nucleotides complementary to a continuous portion of the nucleotide sequence of the polynucleotide described herein, the portion including at least one codon at a codon position selected from codon positions 419, 423, 482, 486, and 494 of SEQ ID NO: 2.

[0016] The invention further includes a method of making a polypeptide of the invention, using a polynucleotide of the invention. For example, the invention includes growing a host cell transformed or transfected with a polynucleotide of the invention under conditions in which the cell expresses the encoded polypeptide. Optionally, the method further includes purifying the polypeptide from the cell or growth media of the cell.

[0017] The invention further encompasses a method for determining whether an HCV-infected patient is infected with an HCV strain that has a decreased sensitivity to VX-222, a method for characterizing the HCV inhibitory activity of an agent, a method for identifying an agent able to rescue the polymerase-inhibitor activity of VX-222 against an HCV NS5B polymerase having resistance to VX-222, and a method for detecting the presence of drug-resistant HCV in a sample comprising HCV.

[0018] The following numbered paragraphs each succinctly define one or more exemplary variations of the invention:

[0019] 1. An isolated polypeptide comprising an amino acid sequence comprising at least one variation from SEQ ID NO: 1, the at least one variation selected from the group consisting of cysteine, isoleucine, valine, or proline at amino acid position 419; alanine at amino acid position 423; alanine, threonine, valine, or asparagine at amino acid position 482; valine, isoleucine, threonine, or serine at amino acid position 486; and isoleucine at amino acid position 494, as the amino acid positions are defined in SEQ ID NO: 1, wherein the polypeptide has Hepatitis C Virus (HCV) NS5B polymerase activity.

[0020] 2. The isolated polypeptide of paragraph 1 comprising an amino acid sequence at least 75% identical to SEQ ID NO: 1.

[0021] 3. The isolated polypeptide of paragraph 1 comprising an amino acid sequence at least 85% identical to SEQ ID NO: 1.

[0022] 4. The isolated polypeptide of paragraph 1 comprising an amino acid sequence at least 90% identical to SEQ ID NO: 1.

[0023] 5. The isolated polypeptide of paragraph 1 comprising an amino acid sequence at least 95% identical to SEQ ID NO: 1.

[0024] 6. The isolated polypeptide of paragraph 1 comprising an amino acid sequence 100% identical to SEQ ID NO: 1 except for the at least one variation.

[0025] 7. The isolated polypeptide of paragraph 1, wherein the amino acid sequence comprises at least 85% identity to a portion of SEQ ID NO: 1 having HCV NS5B polymerase activity.

[0026] 8. The isolated polypeptide of any one of paragraphs 1-7, wherein the amino acid residue of the polypeptide corresponding to amino acid 419 of SEQ ID NO: 1 is cysteine, isoleucine, valine, or proline.

[0027] 9. The isolated polypeptide of any one of paragraphs 1-7, wherein the amino acid residue of the polypeptide corresponding to amino acid 423 of SEQ ID NO: 1 is alanine.

[0028] 10. The isolated polypeptide of any one of paragraphs 1-7, wherein the amino acid residue of the polypeptide corresponding to amino acid 482 of SEQ ID NO: 1 is alanine, threonine, valine, or asparagine.

[0029] 11. The isolated polypeptide of any one of paragraphs 1-7, wherein the amino acid residue of the polypeptide corresponding to amino acid 486 of SEQ ID NO: 1 is valine, isoleucine, threonine, or serine.

[0030] 12. The isolated polypeptide of any one of paragraphs 1-7, wherein the amino acid residue of the polypeptide corresponding to amino acid 494 of SEQ ID NO: 1 is isoleucine.

[0031] 13. The isolated polypeptide of any one of paragraphs 9-12, wherein the amino acid residue of the polypeptide corresponding to amino acid 419 of SEQ ID NO: 1 is methionine or serine.

[0032] 14. The isolated polypeptide of any one of paragraphs 8, 10, 11, and 12, wherein the amino acid residue of the polypeptide corresponding to amino acid 423 of SEQ ID NO: 1 is isoleucine, threonine, or valine.

[0033] 15. The isolated polypeptide of any one of paragraphs 8, 9, 11, and 12, wherein the amino acid residue of the polypeptide corresponding to amino acid 482 of SEQ ID NO: 1 is leucine.

[0034] 16. The isolated polypeptide of any one of paragraphs 8-12, wherein the amino acid residue of the polypeptide corresponding to amino acid 422 of SEQ ID NO: 1 is tyrosine.

[0035] 17. The isolated polypeptide of paragraph 8, wherein the amino acid residue of the polypeptide corresponding to amino acid 423 of SEQ ID NO: 1 is alanine.

[0036] 18. The isolated polypeptide of paragraph 8 or paragraph 17, wherein the amino acid residue of the polypeptide corresponding to amino acid 482 of SEQ ID NO: 1 is alanine, threonine, valine, or asparagine.

[0037] 19. The isolated polypeptide of any one of paragraphs 8, 17, and 18, wherein the amino acid residue of the polypeptide corresponding to amino acid 486 of SEQ ID NO: 1 is valine, isoleucine, threonine, or serine.

[0038] 20. The isolated polypeptide of any one of paragraphs 8 and 17-19, wherein the amino acid residue of the polypeptide corresponding to amino acid 494 of SEQ ID NO: 1 is isoleucine.

[0039] 21. An isolated polypeptide comprising an amino acid sequence at least 90% identical to the amino acid sequence of SEQ ID NO: 3 or at least 90% identical to a portion of SEQ ID NO: 3 having Hepatitis C Virus (HCV) NS5B polymerase activity, with the proviso that at least one of the amino acids of the polypeptide that correspond to positions 419, 423, 482, 486, and/or 494 of SEQ ID NO: 3 is identical to the corresponding amino acid(s) of SEQ ID NO: 3.

[0040] 22. The isolated polypeptide of paragraph 21, wherein the amino acid residue of the polypeptide corresponding to amino acid 419 of SEQ ID NO: 3 is cysteine, isoleucine, valine, or proline.

[0041] 23. The isolated polypeptide of paragraph 21, wherein the amino acid residue of the polypeptide corresponding to amino acid 423 of SEQ ID NO: 3 is alanine.

[0042] 24. The isolated polypeptide of paragraph 21, wherein the amino acid residue of the polypeptide corresponding to amino acid 482 of SEQ ID NO: 3 is alanine, threonine, valine, or asparagine.

[0043] 25. The isolated polypeptide of paragraph 21, wherein the amino acid residue of the polypeptide corresponding to amino acid 486 of SEQ ID NO: 3 is valine, isoleucine, threonine, or serine.

[0044] 26. The isolated polypeptide of paragraph 21, wherein the amino acid residue of the polypeptide corresponding to amino acid 494 of SEQ ID NO: 3 is isoleucine.

[0045] 27. The isolated polypeptide of any one of paragraphs 23-26, wherein the amino acid residue of the polypeptide corresponding to amino acid 419 of SEQ ID NO: 3 is methionine or serine.

[0046] 28. The isolated polypeptide of any one of paragraphs 22, 24, 25, and 26, wherein the amino acid residue of the polypeptide corresponding to amino acid 423 of SEQ ID NO: 3 is isoleucine, threonine, or valine.

[0047] 29. The isolated polypeptide of any one of paragraphs 22, 23, 25, and 26, wherein the amino acid residue of the polypeptide corresponding to amino acid 482 of SEQ ID NO: 3 is leucine.

[0048] 30. The isolated polypeptide of any one of paragraphs 22-26, wherein the amino acid residue of the polypeptide corresponding to amino acid 422 of SEQ ID NO: 3 is tyrosine.

[0049] 31. The isolated polypeptide of paragraph 22, wherein the amino acid residue of the polypeptide corresponding to amino acid 423 of SEQ ID NO: 1 is alanine.

[0050] 32. The isolated polypeptide of paragraph 22 or paragraph 31, wherein the amino acid residue of the polypeptide corresponding to amino acid 482 of SEQ ID NO: 1 is alanine, threonine, valine, or asparagine.

[0051] 33. The isolated polypeptide of any one of paragraphs 22, 31, and 32, wherein the amino acid residue of the polypeptide corresponding to amino acid 486 of SEQ ID NO: 1 is valine, isoleucine, threonine, or serine.

[0052] 34. The isolated polypeptide of any one of paragraphs 22 and 31-33, wherein the amino acid residue of the polypeptide corresponding to amino acid 494 of SEQ ID NO: 1 is isoleucine.

[0053] 35. The isolated polypeptide of any one of paragraphs 1-35 attached to a detectable label. Exemplary labels include fluorescent dyes (e.g., fluorescein, Alexa, or green fluorescent protein), radioisotopes (e.g., ³⁵S, ¹²⁵I, ¹³¹I) or enzymes (e.g., horseradish peroxidase, alkaline phosphatase, secreted alkaline phophatase (SEAP), chloramphenicol acetyltransferase (CAT), luciferase, and β-galactosidase)

[0054] 36. The isolated polypeptide of any one of paragraphs 1-35 attached to a heterologous peptide tag. Exemplary tags include a His tag, a FLAG tag, a hemaglutinin tag, a glutathione-S-transferase tag, a maltose binding protein tag, a green fluorescent protein tag, and a chitin binding protein tag. For these purposes, “heterologous” refers to a tag that does not naturally occur in HCV.

[0055] 37. The isolated polypeptide of any one of paragraphs 1-35 fused to a heterologous peptide. For these purposes, “heterologous” refers to a peptide or polypeptide that does not naturally occur in HCV. Exemplary heterologous peptides include, e.g., an immunogenic peptide; a marker or reporter protein; a signal peptide; and fragments of any of the foregoing

[0056] 38. The isolated polypeptide of any one of paragraphs 1-35 fused to a heterologous signal peptide. Heterologous signal peptides are signal peptides from non-HCV proteins, such as signal peptides from animal, plant, fungi, or other organisms. Preferred signal peptides include those for proteins naturally expressed by the cell or organism to be used to express the polypeptide of the invention.

[0057] 39. An isolated peptide having no more than 50 amino acids and comprising a sequence of 6-50 amino acids that is at least 90% identical to a portion of the amino acid sequence of SEQ ID NO: 3 encompassing at least one of amino acid residues 419, 423, 482, 486, and 494, with the proviso that, when present, at least one of the amino acids of the polypeptide that corresponds to positions 419, 423, 482, 486, and/or 494 of SEQ ID NO: 3 is identical to the corresponding amino acid(s) of SEQ ID NO: 3.

[0058] 40. The peptide of paragraph 39 comprising no more than 25 amino acids.

[0059] 41. The peptide of paragraph 40 comprising no more than 15 amino acids.

[0060] 42. The peptide of any one of paragraphs 39-41 capable of eliciting an antibody that specifically binds to a VX-222-resistant HCV NS5B polymerase.

[0061] 43. An isolated polypeptide comprising the amino acid sequence of SEQ ID NOs: 4-502.

[0062] 44. An isolated antibody or fragment thereof that specifically binds the polypeptide of any one of paragraphs 1-43.

[0063] 45. The isolated antibody or fragment thereof of paragraph 44, that is an antibody fragment selected from the group consisting of an F(ab′)2, Fab, Fab′, Fv, Fc, or Fd fragment

[0064] 46. The isolated antibody or fragment thereof of paragraph 44, wherein the antibody is a monoclonal antibody.

[0065] 47. The isolated antibody or fragment thereof of paragraph 44 or paragraph 46, wherein the antibody is a chimeric antibody, a humanized antibody, or a human antibody.

[0066] 48. A hybridoma that produces an antibody that specifically binds the polypeptide of any one of paragraphs 1-43.

[0067] 49. An isolated polynucleotide comprising a nucleotide sequence encoding the polypeptide of any one of paragraphs 1-43.

[0068] 50. An isolated polynucleotide comprising a nucleotide sequence encoding a polypeptide having Hepatitis C Virus (HCV) NS5B polymerase activity, the nucleotide sequence comprising at least one codon variation from SEQ ID NO: 2, the at least one codon variation from SEQ ID NO: 2 selected from the group consisting of a codon encoding cysteine, isoleucine, valine, or proline at codon 419; a codon encoding alanine at codon 423; a codon encoding alanine, threonine, valine, or asparagine at codon 482; a codon encoding valine, isoleucine, threonine, or serine at codon 486; and a codon encoding isoleucine at codon 494, as the codon positions are defined in SEQ ID NO: 2.

[0069] 51. The isolated polynucleotide of paragraph 50, comprising a codon encoding cysteine, isoleucine, valine, or proline at the position in the nucleotide sequence corresponding to codon 419 of SEQ ID NO: 2.

[0070] 52. The isolated polynucleotide of paragraph 50, comprising a codon encoding alanine at the position in the nucleotide sequence corresponding to codon 423 of SEQ ID NO: 2.

[0071] 53. The isolated polynucleotide of paragraph 50, comprising a codon encoding alanine, threonine, valine, or asparagine at the position in the nucleotide sequence corresponding to codon 482 of SEQ ID NO: 2.

[0072] 54. The isolated polynucleotide of paragraph 50, comprising a codon encoding valine, isoleucine, threonine, or serine at the position in the nucleotide sequence corresponding to codon 486 of SEQ ID NO: 2.

[0073] 55. The isolated polynucleotide of paragraph 50, comprising a codon encoding isoleucine at the position in the nucleotide sequence corresponding to codon 494 of SEQ ID NO: 2.

[0074] 56. An isolated polynucleotide comprising a nucleotide sequence that encodes at least one of the amino acid sequences selected from the group consisting of SEQ ID NOs: 4-502.

[0075] 57. An isolated polynucleotide comprising no more than 50 nucleotides and comprising a nucleotide sequence of 14-50 nucleotides complementary to a continuous portion of the nucleotide sequence of the polynucleotide of paragraph 50, the portion including at least one codon at a codon position selected from codon positions 419, 423, 482, 486, and 494 of SEQ ID NO: 2.

[0076] 58. The polynucleotide of paragraph 57 capable of sequence-specific hybridization to a polynucleotide comprising a nucleotide sequence encoding a VX-222-resistant HCV NS5B polymerase. Another variation of the invention is a kit containing 2, 3, 4, 5, 6, or more different polynucleotides of this type, for detecting mutants at two or more of these codons.

[0077] 59. The polynucleotide of any one of paragraphs 49-58 further comprising a detectable label.

[0078] 60. The polynucleotide of any one of paragraphs 49-59 operably linked to a heterologous expression control sequence.

[0079] 61. A composition comprising the polynucleotide of any one of paragraphs 49-60 and a carrier.

[0080] 62. An expression vector comprising the polynucleotide of any one of paragraphs 49-56 and 60. For purposes of this aspect of the invention, the term “expression vector: excludes HCV virus. An isolated HCV virus containing a polynucleotide of the invention is a separate and distinct aspect of the invention.

[0081] 63. The expression vector of paragraph 62, wherein the expression vector is a viral vector.

[0082] 64. The expression vector of paragraph 62 or paragraph 63, wherein the polynucleotide is operably linked to a heterologous expression control sequence.

[0083] 65. The expression vector of any one of paragraphs 62-64 further comprising a 3′ non-translated region of an HCV genome.

[0084] 66. An isolated cell comprising the expression vector of any one of paragraphs 62-65.

[0085] 67. The isolated cell of paragraph 66, wherein the cell is a hepatocyte.

[0086] 68. An isolated cell transformed or transfected with a polynucleotide according to any one of paragraphs 49-60, wherein the cell expresses a polypeptide encoding by the polynucleotide, and wherein the cell is free of HCV infection.

[0087] 69. A hepatocyte cell line transformed or transfected with an HCV, wherein the nucleotide sequence of the HCV that encodes NS5B polymerase is identical to the nucleotide sequence of a polynucleotide of the invention.

[0088] 70. A composition comprising the polypeptide of any one of paragraphs 1-43 and a carrier.

[0089] 71. An assay mixture comprising an isolated polypeptide according to any one of paragraphs 1-43, an isolated RNA template, an RNA primer, nucleotide triphosphates, and buffer.

[0090] 72. A method for determining whether an HCV-infected patient is infected with an HCV strain that has a decreased sensitivity to VX-222, the method comprising determining the presence or absence of the polypeptide of any one of paragraphs 1-34 in a biological sample from the patient, wherein the presence of the polypeptide indicates infection with an HCV strain that has a decreased sensitivity to VX-222. For the purposes of this method, “determining the presence or absence of the polypeptide of any one of paragraphs 1-34” should be understood to refer to evaluating the presence or absence of a polypeptide having an amino acid sequence identical to the sequence of the polypeptide defined in these paragraphs. The polypeptide in the sample may, for example, be part of an HCV polyprotein or in mixture with other proteins rather than an isolated polypeptide per se.

[0091] 73. A method for characterizing the HCV inhibitory activity of an agent, the method comprising performing an HCV NS5B polymerase reaction with the polypeptide of any one of paragraphs 1-34 in the presence of an agent, and comparing polymerase activity in the presence of the agent with polymerase activity of the polypeptide in the absence of the agent.

[0092] 74. The method of paragraph 73, wherein the method further comprises performing an HCV NS5B polymerase reaction in the absence of the agent.

[0093] 75. The method of paragraph 73, wherein comparing polymerase activity comprises comparing the amount of polynucleotide generated by the NS5B polymerase reaction in the presence of the agent with the amount of polynucleotide generated by the NS5B polymerase reaction in the absence of the agent, wherein a decrease in the amount of polynucleotide generated by the polypeptide in the presence of the agent is indicative of HCV inhibitory activity.

[0094] 76. A method for identifying an agent able to rescue the polymerase-inhibitor activity of VX-222 against an HCV NS5B polymerase having resistance to VX-222, the method comprising: a) performing an HCV NS5B polymerase reaction with the polypeptide of any one of paragraph 1-34 in the presence of an agent and VX-222; and b) comparing polymerase activity of the polypeptide in the presence of the agent with polymerase activity of the polypeptide in the absence of the agent, wherein a decrease in HCV polymerase activity in the presence of the agent is indicative of the ability to rescue the polymerase-inhibitory activity of VX-222 against an HCV NS5B polymerase having resistance to VX-222.

[0095] 77. A method for determining whether an HCV-infected patient is infected with an HCV strain that has a decreased sensitivity to VX-222, the method comprising determining the presence or absence of the polynucleotide of any one of paragraphs 49-56 in a biological sample from the patient, wherein the presence of the polynucleotide indicates infection with an HCV strain having a decreased sensitivity to VX-222. For the purposes of this method, “determining the presence or absence of the polynucleotide of any one of paragraphs 49-56” should be understood to refer to evaluating the presence or absence of a polynucleotide having a nucleotide sequence identical to the sequence of the polynucleotide defined in these paragraphs. The polynucleotide in the sample may, for example, be an HCV genomic polynucleotide rather than an isolated polynucleotide per se.

[0096] 78. A method for detecting the presence of drug-resistant HCV in a sample comprising HCV, wherein the method comprises determining the presence or absence of an HCV NS5B polypeptide with an amino acid sequence in which at least one amino acid that corresponds to positions 419, 423, 482, 486, and/or 494 of SEQ ID NO: 3 is identical to the corresponding amino acid(s) of SEQ ID NO: 3, wherein the presence of the at least one amino acid in the HCV NS5B protein indicates the presence of drug-resistant HCV.

[0097] 79. The method of paragraph 72 or paragraph 78, wherein determining the presence or absence of the polypeptide comprises contacting the sample with an antibody or fragment thereof that specifically binds the polypeptide and detecting binding of the antibody or fragment thereof to the polypeptide.

[0098] 80. A method for detecting the presence of drug-resistant HCV in a sample, wherein the method comprises determining the presence or absence of a polynucleotide in the sample, the polynucleotide comprising a nucleic acid sequence encoding HCV NS5B polymerase containing at least one codon selected from the group consisting of a codon encoding cysteine, isoleucine, valine, or proline at a position corresponding to codon position 419 of SEQ ID NO: 2; a codon encoding alanine at a position corresponding to codon position 423 of SEQ ID NO: 2; a codon encoding alanine, threonine, valine, or asparagine at a position corresponding to codon position 482 of SEQ ID NO: 2; a codon encoding valine, isoleucine, threonine, or serine at a position corresponding to codon position 486 of SEQ ID NO: 2; and a codon encoding isoleucine at a position corresponding to codon position 494 of SEQ ID NO: 2, wherein the presence of the at least one codon indicates the presence of drug-resistant HCV in the sample.

[0099] 81. The method of paragraph 77 or paragraph 80, wherein the method comprises contacting polynucleotides in the sample with a nucleic acid probe that comprises a polynucleotide according to paragraph 58, under conditions allowing sequence-specific hybridization of the nucleic acid probe with a target sequence, wherein hybridization of the nucleic acid probe to a polynucleotide in the sample indicates the presence of drug-resistant HCV in the sample.

[0100] 82. The method of paragraph 77 or paragraph 80, wherein the method comprises sequencing one or more polynucleotides in the sample to determine the presence the polynucleotide.

[0101] 83. A method for determining whether an HCV-infected patient is infected with an HCV strain that has a decreased sensitivity to VX-222, the method comprising determining the presence or absence of a polypeptide in a biological sample from the patient, the polypeptide comprising an amino acid sequence comprising at least one variation from SEQ ID NO: 1, the at least one variation selected from the group consisting of cysteine, isoleucine, methionine, serine, valine, or proline at amino acid position 419; lysine at amino acid position 422; alanine, isoleucine, threonine, or valine at amino acid position 423; alanine, leucine, threonine, valine, or asparagine at amino acid position 482; valine, isoleucine, threonine, or serine at amino acid position 486; and isoleucine or alanine at amino acid position 494, as the amino acid positions are defined in SEQ ID NO: 1, wherein the presence of the polypeptide indicates infection with an HCV strain that has a decreased sensitivity to VX-222.

[0102] 84. A method for identifying an agent able to rescue the polymerase-inhibitor activity of VX-222 against an HCV NS5B polymerase having resistance to VX-222, the method comprising: a) performing an HCV NS5B polymerase reaction with a polypeptide comprising an amino acid sequence comprising at least one variation from SEQ ID NO: 1, the at least one variation selected from the group consisting of cysteine, isoleucine, methionine, serine, valine, or proline at amino acid position 419; lysine at amino acid position 422; alanine, isoleucine, threonine, or valine at amino acid position 423; alanine, leucine, threonine, valine, or asparagine at amino acid position 482; valine, isoleucine, threonine, or serine at amino acid position 486; and isoleucine or alanine at amino acid position 494, as the amino acid positions are defined in SEQ ID NO: 1, in the presence of an agent and VX-222; and b) comparing polymerase activity of the polypeptide in the presence of the agent with polymerase activity of the polypeptide in the absence of the agent, wherein a decrease in HCV polymerase activity in the presence of the agent is indicative of the ability to rescue the polymerase-inhibitory activity of VX-222 against an HCV NS5B polymerase having resistance to VX-222.

[0103] 85. The method of paragraph 83 or 84, wherein polypeptide comprises at least one variation selected from the group consisting of cysteine, isoleucine, valine, or proline at amino acid position 419; alanine, valine, or asparagine at amino acid position 482; valine, isoleucine, threonine, or serine at amino acid position 486; and isoleucine at amino acid position 494, as the amino acid positions are defined in SEQ ID NO: 1.

[0104] 86. A method for determining whether an HCV-infected patient is infected with an HCV strain that has a decreased sensitivity to VX-222, the method comprising determining the presence or absence of a polynucleotide in a biological sample from the patient, the polynucleotide comprising a nucleic acid sequence encoding HCV NS5B polymerase containing at least one codon selected from the group consisting of a codon encoding cysteine, isoleucine, methionine, serine, valine, or proline at a position corresponding to codon position 419 of SEQ ID NO: 2; a codon encoding lysine at a position corresponding to codon position 422 of SEQ ID NO: 2; a codon encoding alanine, isoleucine, threonine, or valine at a position corresponding to codon position 423 of SEQ ID NO: 2; a codon encoding alanine, leucine, threonine, valine, or asparagine at a position corresponding to codon position 482 of SEQ ID NO: 2; a codon encoding valine, isoleucine, threonine, or serine at a position corresponding to codon position 486 of SEQ ID NO: 2; and a codon encoding isoleucine or alanine at a position corresponding to codon position 494 of SEQ ID NO: 2, wherein the presence of the polynucleotide indicates infection with an HCV strain having a decreased sensitivity to VX-222.

[0105] 87. The method of paragraph 86, wherein polynucleotide comprises at least one codon selected from the group consisting of a codon encoding cysteine, isoleucine, valine, or proline at codon position 419 of SEQ ID NO: 2; a codon encoding alanine, valine, or asparagine at codon position 482 of SEQ ID NO: 2; a codon encoding valine, isoleucine, threonine, or serine at codon position 486 of SEQ ID NO: 2; and a codon encoding isoleucine at codon position 494 of SEQ ID NO: 2.

[0106] The foregoing summary is not intended to define every aspect of the invention, and additional aspects are described in other sections, such as the Detailed Description. The entire document is intended to be related as a unified disclosure, and it should be understood that all combinations of features described herein are contemplated, even if the combination of features are not found together in the same sentence, or paragraph, or section of this document. Where embodiments concerning a polypeptide are described, embodiments involving polynucleotides that encode the polypeptide are specifically contemplated, and the reverse also is true. Where embodiments of the invention are described with respect to a specific NS5B polymerase mutant, it should be appreciated that analogous embodiments involving fragments, variants, analogs, and the like are specifically contemplated.

[0107] In addition to the foregoing, the invention includes, as an additional aspect, all embodiments of the invention narrower in scope in any way than the variations specifically mentioned above. With respect to aspects of the invention described as a genus, all individual species are individually considered separate aspects of the invention. For instance, if a polypeptide is described as having any one of two, three, four, or five amino acids at a specific position, then a polypeptide having each of the specific amino acids in that position is contemplated as an individual embodiment of the invention. Similarly, if a polypeptide is described in this manner with respect to two or more amino acid positions, then a polypeptide with each combination of amino acids is contemplated as a species of the invention. With respect to aspects of the invention described or claimed with “a” or “an,” it should be understood that these terms mean “one or more” unless context unambiguously requires a more restricted meaning. With respect to elements described as one or more within a set, it should be understood that all combinations within the set are contemplated. If aspects of the invention are described as “comprising” a feature, embodiments also are contemplated “consisting of” or “consisting essentially of” the feature.

[0108] Although the applicant(s) invented the full scope of the claims appended hereto, the claims appended hereto are not intended to encompass within their scope the prior art work of others. Therefore, in the event that statutory prior art within the scope of a claim is brought to the attention of the applicants by a Patent Office or other entity or individual, the applicant(s) reserve the right to exercise amendment rights under applicable patent laws to redefine the subject matter of such a claim to specifically exclude such statutory prior art or obvious variations of statutory prior art from the scope of such a claim. Variations of the invention defined by such amended claims also are intended as aspects of the invention. Additional features and variations of the invention will be apparent to those skilled in the art from the entirety of this application, and all such features are intended as aspects of the invention.

### DESCRIPTION OF THE FIGURES

[0109] FIGS. 1A-1C are a depiction of the nucleic acid sequence and the amino acid sequence encoding wild-type genotype 1b HCV NS5B polymerase, correlating the amino acid and codon positions within the sequences. The nucleic acid sequence is SEQ ID NO: 2 and the amino acid sequence is SEQ ID NO: 1 used herein.

[0110] FIGS. 2A and 2B are tables correlating the concentration of VX-222 and the frequency of resistant-colony formation of genotype 1a replicons and genotype 1b replicons.

[0111] FIGS. 3A-3C are an alignment of the amino acid sequence encoding wild-type genotype 1b HCV NS5B polymerase (SEQ ID NO: 1) and the amino acid sequence encoding wild-type genotype 1a HCV NS5B polymerase (SEQ ID NO: 514).

### DETAILED DESCRIPTION OF THE INVENTION

[0112] The invention is predicated, at least in part, on the surprising discovery of HCV strains containing particular mutations that render the HCV strains resistant to the therapeutic potential of HCV inhibitor compounds. In this regard, it has been determined that resistance to anti-viral agents, such as polymerase inhibitors, is accompanied by mutations in the Hepatitis C virus NS5B polymerase. These discoveries may be exploited in the design of therapies for the treatment of HCV infection.

### Polypeptides

[0113] The invention provides an isolated polypeptide comprising an amino acid sequence comprising at least one variation from SEQ ID NO: 1, the at least one variation selected from the group consisting of cysteine, isoleucine, valine, or proline at amino acid position 419; alanine at amino acid position 423; alanine, threonine, valine, or asparagine at amino acid position 482; valine, isoleucine, threonine, or serine at amino acid position 486; and isoleucine at amino acid position 494, wherein the polypeptide has HCV NS5B polymerase activity. The numbering system for the polypeptide used herein is in reference to the amino acid sequence of SEQ ID NO: 1, which is the amino acid sequence of a wild-type NS5B polymerase from HCV genotype 1b. The variations described herein are also contemplated for other genotype and subtype backgrounds, e.g., HCV genotype 1a. The amino acid sequence and nucleic acid sequence of wild-type HCV genotype 1a NS5B polymerase is set forth in SEQ ID NOs: 514 and 515, respectively. HCV NS5B polymerase polypeptides having the one or more described variations have been found to have resistance to at least one polymerase inhibitor, VX-222, described in, e.g., International Patent Publication Nos. WO 2008/058393 and WO 2002/100851, incorporated by reference in their entirety.

[0114] In one aspect, the polypeptide comprises a single variation at amino acid position 419, 423, 482, 486, or 496. Alternatively, the polypeptide comprises a single variation at amino acid position 419, 482, 486, or 494. Alternatively, the polypeptide comprises variations at two or more of amino acid positions 419, 423, 482, 486, and/or 496. All combinations of amino acids cysteine, isoleucine, valine, or proline at amino acid position 419; alanine at amino acid position 423; alanine, threonine, valine, or asparagine at amino acid position 482; valine, isoleucine, threonine, or serine at amino acid position 486; and/or isoleucine at amino acid position 494 are contemplated as variations characteristic of polypeptides of the invention. For example, the polypeptide comprising a cysteine, isoleucine, valine, or proline at amino acid position 419 also can comprise: an alanine at amino acid position 423 and/or an alanine, threonine, valine, or asparagine at amino acid position 482 and/or a valine, isoleucine, threonine, or serine at amino acid position 486 and/or isoleucine at amino acid position 494. Similarly, a polypeptide comprising an alanine at amino acid position 423 also can comprise: a cysteine, isoleucine, valine, or proline at amino acid position 419 and/or an alanine, threonine, valine, or asparagine at amino acid position 482 and/or a valine, isoleucine, threonine, or serine at amino acid position 486 and/or isoleucine at amino acid position 494. A polypeptide comprising an alanine, threonine, valine, or asparagine at amino acid position 482 also can comprise: a cysteine, isoleucine, valine, or proline at amino acid position 419 and/or an alanine at amino acid position 423 and/or a valine, isoleucine, threonine, or serine at amino acid position 486 and/or isoleucine at amino acid position 494. A polypeptide comprising a valine, isoleucine, threonine, or serine at amino acid position 486 also can comprise: cysteine, isoleucine, valine, or proline at amino acid position 419 and/or alanine at amino acid position 423 and/or alanine, threonine, valine, or asparagine at amino acid position 482 and/or isoleucine at amino acid position 494. A polypeptide comprising isoleucine at amino acid position 494 also can comprise: cysteine, isoleucine, valine, or proline at amino acid position 419 and/or alanine at amino acid position 423 and/or alanine, threonine, valine, or asparagine at amino acid position 482 and/or a valine, isoleucine, threonine, or serine at amino acid position 486.

[0115] In various embodiments, the polypeptide comprises a cysteine, isoleucine, valine, methionine, serine, or proline at amino acid position 419 and also comprises: an alanine, isoleucine, threonine, or valine at amino acid position 423 and/or an alanine, threonine, valine, leucine or asparagine at amino acid position 482 and/or a valine, isoleucine, threonine, or serine at amino acid position 486 and/or isoleucine or alanine at amino acid position 494. Alternatively, the polypeptide comprises an alanine, isoleucine, threonine, or valine at amino acid position 423 and further comprises: a cysteine, isoleucine, valine, methionine, serine, or proline at amino acid position 419 and/or an alanine, threonine, valine, leucine, or asparagine at amino acid position 482 and/or a valine, isoleucine, threonine, or serine at amino acid position 486 and/or isoleucine or alanine at amino acid position 494. A polypeptide comprising an alanine, threonine, valine, leucine, or asparagine at amino acid position 482 also comprises, in various aspects: a cysteine, isoleucine, valine, methionine, serine, or proline at amino acid position 419 and/or an alanine, isoleucine, threonine, or valine at amino acid position 423 and/or a valine, isoleucine, threonine, or serine at amino acid position 486 and/or isoleucine or alanine at amino acid position 494. A polypeptide comprising a valine, isoleucine, threonine, or serine at amino acid position 486 also can comprise: cysteine, isoleucine, valine, methionine, serine, or proline at amino acid position 419 and/or alanine, isoleucine, threonine, or valine at amino acid position 423 and/or alanine, threonine, valine, leucine, or asparagine at amino acid position 482 and/or isoleucine or alanine at amino acid position 494. A polypeptide comprising isoleucine or alanine at amino acid position 494 also can comprise: cysteine, isoleucine, valine, methionine, serine, or proline at amino acid position 419 and/or alanine, isoleucine, threonine, or valine at amino acid position 423 and/or alanine, threonine, valine, leucine, or asparagine at amino acid position 482 and/or a valine, isoleucine, threonine, or serine at amino acid position 486. Any of the polypeptides also comprises, in various embodiments, a lysine at amino acid position 422.

[0116] In one embodiment, the polypeptide comprising alanine at amino acid position 423; alanine, threonine, valine, or asparagine at amino acid position 482; valine, isoleucine, threonine, or serine at amino acid position 486; and/or isoleucine at amino acid position 494, also comprises a methionine or serine at position 419. Alternatively, the polypeptide comprises cysteine, isoleucine, valine, or proline at amino acid position 419; alanine, threonine, valine, or asparagine at amino acid position 482; valine, isoleucine, threonine, or serine at amino acid position 486; and/or isoleucine at amino acid position 494, and further comprises isoleucine, threonine, alanine, or valine at amino acid position 423. In another embodiment, the polypeptide comprises cysteine, isoleucine, valine, or proline at amino acid position 419; alanine at amino acid position 423; valine, isoleucine, threonine, or serine at amino acid position 486; and/or isoleucine at amino acid position 494, and further comprises leucine or threonine at amino acid position 482. In another embodiment, the polypeptide comprises cysteine, isoleucine, valine, or proline at amino acid position 419; alanine, threonine, valine, or asparagine at amino acid position 482; and/or valine, isoleucine, threonine, or serine at amino acid position 486, and further comprises alanine at amino acid position 494 (as well as, optionally, alanine at amino acid position 423). Any of the polypeptides may also include a lysine at amino acid position 422. The invention further provides an isolated polypeptide comprising (or consisting of) the amino acid sequence of any one of SEQ ID NOs: 4-502.

[0117] Optionally, the inventive polypeptide comprises additional variations with respect to the amino acid sequence of SEQ ID NO: 1 other than variations at positions 419, 423, 482, 486, and/or 494 due to natural deviation (e.g., differences in amino acid sequence among different HCV genotypes) or mutagenesis. HCV encompasses a heterogeneous family of virus having similar characteristics; for example, HCV is characterized as an enveloped RNA virus, approximately 50 nm in diameter, that primarily infects humans. Eleven HCV genotypes (numbered one through eleven) have been identified, many of which include more than one distinct subtype and multiple strains. The predominant HCV genotype worldwide is genotype 1, which encompasses two main subtypes, genotype 1a and genotype 1b. The different genotypes and subtypes share a common genomic structure (i.e., contain the same structural and non-structural genes), but differ with respect to genome sequences, pathogenicity, and prevalence in different areas of the world. While the NS5B polymerase is structurally and functionally similar among the different HCV genotypes, subtypes, and strains, the NS5B polymerase amino acid sequence may differ among different viral isolates (e.g., clinical viral isolates within the same genotype).

[0118] For example, NS5B polymerase polypeptides isolated from genotype 1b clinical isolates were sequenced, and the amino acid sequences were found to demonstrate a mean percent identity of about 92-96% compared to SEQ ID NO: 1 over 547 amino acids (N=538). The population of NS5B polymerases included polypeptides having amino acid sequences demonstrating about 87% identity to SEQ ID NO: 1. NS5B polymerase polypeptides isolated from genotype 1a clinical isolates were sequenced and found to comprise amino acid sequences demonstrating a mean percent identity of about 84-88% compared to SEQ ID NO: 1 over 547 amino acids, and the population included polymerases having sequences demonstrating about 76% identity to SEQ ID NO: 1 (N=239). The nucleic acid sequences of NS5B polymerase taken from genotype 1b and 1a clinical isolates were compared to the nucleic acid sequence of SEQ ID NO: 2 (i.e., the nucleic acid sequence of wild-type NS5B polymerase of HCV genotype 1b). The nucleic acid sequences encoding genotype 1b NS5B polymerase demonstrated a mean percent identity of about 92-94% to the nucleic acid sequence of SEQ ID NO: 2 over 1668 base pairs, and isolates were identified having 91% identity to SEQ ID NO: 2. Nucleic acid sequences encoding genotype 1a HCV NS5B polymerase demonstrated a mean percent identity of 80-82% to SEQ ID NO: 2, and isolates were identified having about 79% identity to SEQ ID NO: 2.

[0119] The amino acid and nucleic acid sequences of HCV NS5B polymerases from different HCV genotypes are disclosed in publicly available sequence databases, such as Genbank. Generally, the first four amino acids of the HCV NS5B polymerase sequence (SMSY (SEQ ID NO: 503)) are conserved among the different strains. While the amino acid residue positions described herein are in reference to SEQ ID NO: 1, the corresponding amino acids of other HCV NS5B polymerases (such as NS5B polymerases from HCV genotype 1a, genotype 2a, genotype 2b, genotype 2c, genotype 3a, or genotype 3b) can be identified by aligning the amino acid sequences with SEQ ID NO: 1. An exemplary alignment is provided in FIGS. 3A-3C, wherein the amino acid sequence of wild-type genotype 1b NS5B polymerase is aligned with the amino acid sequence of wild-type genotype 1a NS5B polymerase. Polypeptides having the variation(s) described herein relative to any of these other HCV genotypes are specifically contemplated as aspects of the invention.

[0120] In one aspect, the polypeptide (or a polynucleotide encoding a polypeptide) comprises an amino acid sequence that is at least 75%, 76%, 77%, 78%, 79%, 80%, 81%, 82%, 83%, 84%, 85%, 86%, 87%, 88%, 89%, 90%, 91%, 92%, 93%, 94%, 95%, 96%, 97%, 98% or 99% identical to the amino acid sequence of SEQ ID NO: 1 with the proviso that the amino acid sequence of the polypeptide comprises cysteine, isoleucine, valine, or proline at amino acid position 419; alanine at amino acid position 423; alanine, threonine, valine, or asparagine at amino acid position 482; valine, isoleucine, threonine, or serine at amino acid position 486; and/or isoleucine at amino acid position 494, as the amino acid positions are defined in SEQ ID NO: 1, and the polypeptide retains HCV NS5B polymerase activity. For example, in various embodiments, the polypeptide (or the polynucleotide encoding a polypeptide) comprises (or encodes) an amino acid sequence that is at least 75%, 76%, 77%, 78%, 79%, 80%, 81%, 82%, 83%, 84%, 85%, 86%, 87%, 88%, 89%, 90%, 91%, 92%, 93%, 94%, 95%, 96%, 97%, 98% or 99% identical to the amino acid sequence of SEQ ID NO: 1 with the proviso that the amino acid sequence of the polypeptide comprises cysteine, isoleucine, valine, or proline at amino acid position 419; alanine, valine, or asparagine at amino acid position 482; valine, isoleucine, threonine, or serine at amino acid position 486; and/or isoleucine at amino acid position 494, as the amino acid positions are defined in SEQ ID NO: 1, and the polypeptide retains HCV NS5B polymerase activity.

[0121] In addition, the invention provides an isolated polypeptide comprising (or consisting of) an amino acid sequence at least 90% identical to the amino acid sequence of SEQ ID NO: 3 or at least 90% identical to a portion of SEQ ID NO: 3 having HCV NS5B polymerase activity, with the proviso that at least one of the amino acids of the polypeptide that correspond to positions 419, 423, 482, 486, and/or 494 of SEQ ID NO: 3 is identical to the corresponding amino acid(s) of SEQ ID NO: 3. In SEQ ID NO: 3, the amino acid residue at position 419 is cysteine, isoleucine, valine, or proline; the amino acid residue at position 423 is alanine; the amino acid residue at position 482 is alanine, threonine, valine, or asparagine; the amino acid residue at position 486 is valine, isoleucine, threonine, or serine; and the amino acid residue at position 494 is isoleucine. The invention further provides an isolated polypeptide comprising an amino acid sequence at least 90% identical to the amino acid sequence of SEQ ID NO: 516 or at least 90% identical to a portion of SEQ ID NO: 516 having Hepatitis C Virus (HCV) NS5B polymerase activity, with the proviso that at least one of the amino acids of the polypeptide that correspond to positions 419, 482, 486, and/or 494 of SEQ ID NO: 516 is identical to the corresponding amino acid(s) of SEQ ID NO: 516.

[0122] “Sequence identity” means that two amino acid or polynucleotide sequences are identical over a region of comparison, such as a region of at least about 250 residues of SEQ ID NO: 1. Optionally, the region of identity spans at least about 100-500 residues SEQ ID NO: 1 (e.g., the region of identity spans 150-400 residues of SEQ ID NO: 1, spans 200-350 residues of SEQ ID NO: 1, spans 250-300 residues of SEQ ID NO: 1, or spans over all 591 residues of SEQ ID NO: 1), and spans the active domain of the polypeptide. Several methods of conducting sequence alignment are known in the art and include, for example, the homology alignment algorithm (Needleman & Wunsch, J. Mol. Biol., 48, 443 (1970)); the local homology algorithm (Smith & Waterman, Adv. Appl. Math., 2, 482 (1981)); and the search for similarity method (Pearson & Lipman, Proc. Natl. Acad. Sci. USA, 85, 2444 (1988)). Preferably, the algorithm used to determine percent sequence identity and sequence similarity is the BLAST algorithm (Altschul et al., J. Mol. Biol., 215, 403-410 (1990); Henikoff & Henikoff. Proc. Natl. Acad. Sci. USA, 89, 10915 (1989); Karlin & Altschul, Proc. Natl. Acad. Sci. USA, 90, 5873-5787 (1993)). Software for performing BLAST analyses is publicly available through the National Center for Biotechnology Information. Other examples of alignment software, including GAP, BESTFIT, FASTA, PILEUP, and TFASTA provided by Wisconsin Genetics Software Package (Genetics Computer Group, 575 Science Dr., Madison, Wis.), and CLUSTALW (Thompson et al., Nuc. Acids Res., 22, 4673-4680 (1994); http://www.ebi.ac.uk/Tools/clustalw2/index.html), are known in the art.

[0123] Variation within HCV NS5B sequences can occur as a result of natural mutagenesis, and/or a practitioner can modify an HCV NS5B polymerase polypeptide to create a functional variant falling within the scope of the invention using routine laboratory techniques. For example, in one aspect, any of the polypeptides described herein further comprises a tyrosine at amino acid position 422 as defined in SEQ ID NO: 1. Exemplary amino acid substitutions are those which reduce susceptibility to proteolysis and/or confer or modify other physiochemical or functional properties of the polypeptide. According to certain embodiments, additional amino acid substitutions (for example, conservative amino acid substitutions) are made in the naturally-occurring HCV NS5B sequence. A “conservative amino acid substitution” is one in which the amino acid residue is replaced with an amino acid residue having a similar side chain. Families of amino acid residues having similar side chains have been defined within the art. These families include amino acids with basic side chains (e.g., lysine, arginine, and histidine), acidic side chains (e.g., aspartic acid and glutamic acid), uncharged polar side chains (e.g., glycine, asparagine, glutamine, serine, threonine, tyrosine, and cysteine), nonpolar side chains (e.g., alanine, valine, leucine, isoleucine, proline, phenylalanine, methionine, and tryptophan), beta-branched side chains (e.g., threonine, valine, and isoleucine) and aromatic side chains (e.g., tyrosine, phenylalanine, tryptophan, and histidine). It will be appreciated, however, that a practitioner is not limited to creating conservative substitutions so long as the resulting polypeptide has HCV NS5B polymerase activity.

[0124] Amino acid additions and deletions also are appropriate in the context of the invention. For example, in one embodiment, the polypeptide is fused to a heterologous peptide (i.e., amino acids not generally recognized to be part of an HCV NS5B protein sequence). A fusion or chimeric peptide can comprise the entire amino acid sequences of two or more peptides or, alternatively, can be constructed to comprise portions (fragments) of two or more peptides (e.g., 10, 20, 50, 75, 100, 400, 500, or more amino acid residues). It may be desirable to fuse the active domains of two or more factors to generate a fusion peptide having a desired biological activity. In some aspects, the heterologous peptide fused to the inventive polypeptide is, for instance, an immunogenic peptide; a marker protein; a peptide tag, such as a peptide that facilitates purification; a signal peptide; and fragments of any of the foregoing. Exemplary peptide tags include, but are note limited to, a His tag, a FLAG tag, a hemaglutinin tag, a glutathione-S-transferase tag, a green fluorescent protein tag, a maltose binding protein tag, and a chitin binding protein tag.

[0125] Removal of one or more amino acid residues from polypeptide also is appropriate. For example, removal of the C-terminal 21 amino acids of the NS5B polyprotein does not destroy polymerase activity, and deletion of 55 residues at the C-terminus has been reported to improve polymerase activity (Liu et al., Biochemistry, 45(38), 11312-11323 (2006); Ivanov et al., Protein Expression and Purification, 48, 14-23 (2006); Ranjith-Kumar and Kao, “Biochemical Activities of the HCV NS5B RNA-Dependent RNA Polymerase” in Hepatitis C Viruses, Tan ed., Horizon Bioscience, Norfolk, UK (2006); pp. 293-310; Ferrari et al., J. Virol., 73, 1649-1654 (1999); Yamashita et al., J. Biol. Chem., 273, 15479-15486 (1998)). The invention embraces HCV NS5B polymerase fragments having the one or more variations described herein. In this regard, the polypeptide fragment comprises at least 100, at least 150, at least 200, at least 250, at least 300, at least 350, at least 400, at least 450, at least 500, or at least 550 amino acids and, in some embodiments, has HCV NS5B polymerase activity. Alternatively, the polypeptide comprises the amino acid sequence of SEQ ID NO: 1 or SEQ ID NO: 3 truncated by 5 or more (e.g., 10 or more, 15 or more, or 20 or more) amino acids at a single terminus or at the N- and C-termini. For example, in one aspect, the polypeptide comprises (or consists of) the amino acid sequence of SEQ ID NO: 1 or SEQ ID NO: 3 (or a similar amino acid sequence having one or more of the variations described herein and, optionally, HCV NS5B polymerase activity) truncated by 25 or more (e.g., 30 or more, 35 or more, 40 or more, 45 or more, 50 or more, 55 or more, or 60 or more) amino acids at a single terminus or at both the N- and C-termini of SEQ ID NOs: 1 or 3. The polypeptide also can comprise the amino acid sequence of SEQ ID NO: 1 or SEQ ID NO: 3 truncated by no more than 5, 10, 15, 20, 25, 30, 35, 40, 45, 50, 55, or 60 amino acids at a single terminus or at both the N- and C-termini. The fragment displays HCV NS5B polymerase activity as described herein.

[0126] The polypeptide described herein can be generated using any suitable technique for protein production. In one aspect, the polypeptide is synthesized by solid phase synthesis techniques, solution phase synthesis, or a combination of both techniques, as described in, e.g., Hu, Bioprocessing International, 8(4), 22-25 (2010). In another aspect, the invention includes a method of making a polypeptide of the invention, using a polynucleotide of the invention. For example, the invention includes growing a host cell transformed or transfected with a polynucleotide of the invention under conditions in which the cell expresses the encoded polypeptide. Optionally, the method further includes purifying the polypeptide from the cell or growth media of the cell. Alternatively, the polypeptide can be isolated from a biological sample using, e.g., antibodies or fragments thereof that specifically bind the polypeptide, such as the antibodies described herein.

[0127] The polypeptide is chemically modified in some manner distinct from amino acid insertion(s), amino acid deletion(s), or amino acid substitution(s) in some embodiments. In this regard, the polypeptide is chemically bonded with polymers, lipids, other organic moieties, and/or inorganic moieties. Such “peptide derivatives” are prepared to, for instance, increase solubility, absorption, circulating half-life, or targeting to particular cells, tissues, or organs. Suitable modifications include, but are not limited to, attachment to one or more water soluble polymer attachments, such as polyethylene glycol, polyoxyethylene glycol, or polypropylene glycol. Still other useful polymers known in the art include monomethoxy-polyethylene glycol, dextran, cellulose, or other carbohydrate based polymers, poly-(N-vinyl pyrrolidone)-polyethylene glycol, propylene glycol homopolymers, a polypropylene oxide/ethylene oxide co-polymer, polyoxyethylated polyols (e.g., glycerol) and polyvinyl alcohol, as well as mixtures of any of the foregoing. In some aspects of the invention, the polypeptide is attached to a detectable label, such as a fluorescent dye (e.g., fluorescein, Alexa, or green fluorescent protein), radioisotope (e.g., ³⁵S, ¹²⁵I, ¹³¹I) or enzyme (e.g., horseradish peroxidase, alkaline phosphatase, secreted alkaline phophatase (SEAP), chloramphenicol acetyltransferase (CAT), luciferase, and β-galactosidase).

[0128] Changes in the amino acid sequence of the polypeptide preferably do not substantially adversely affect the structural characteristics associated with HCV NS5B polymerase (e.g., disrupt secondary structure characterizing SEQ ID NO: 1) and/or do not substantially diminish NS5B polymerase activity of the polypeptide. In this regard, one skilled in the art can review amino acid alignments or structure-function studies of similar peptides, such as HCV NS5B polymerases from multiple genotypes, subtypes, or strains, to identify residues in the polypeptide that are important for activity or structure. For example, residues that vary between strains without diminishing activity or likely more susceptible to change, whereas conserved residues are more likely to be important for activity. Mutational analysis of NS5B polymerase is described in, e.g., Qin et al., Hepatology, 33(3), 728-737 (2001). One skilled in the art also can analyze three-dimensional structure and the underlying amino acid sequence responsible for three-dimensional structural domains in similar polypeptides. A number of scientific publications have been devoted to the prediction of secondary structure (Moult, Curr. Op. in Biotech., 7(4), 422-427 (1996); Chou et al., Biochemistry, 13(2), 222-245 (1974); Chou et al., Biochemistry, 113(2), 211-222 (1974); Chou et al., Adv. Enzymol. Relat. Areas Mol. Biol., 47, 45-148 (1978); Chou et al., Ann. Rev. Biochem., 47, 251-276 (1979); Chou et al., Biophys. J., 26, 367-384 (1979); Holm et al., Nucl. Acid. Res., 27(1), 244-247 (1999)). In view of structure information, one skilled in the art predicts the alignment of amino acid residues of a peptide with respect to its three-dimensional structure to determine regions suitable for mutation. In this regard, the three-dimensional structure of NS5B polymerase resembles a right hand, with fingers, palm, and thumb domain organization and an encircled active site (see, e.g., Biswal et al., J. Mol. Biol., 361, 33-45 (2006)). The finger, palm, thumb domain organization of NS5B polymerase is consistent with the structure of other polymerases, among which the palm domain spanning amino acid residues 188-225 and 287-370 is conserved. One skilled in the art may choose not to make radical changes to amino acid residues critical for the finger, palm, thumb domain organization or to amino acid residues predicted to form the catalytic pocket of HCV NS5B polymerase, such as, for example, residues 158, 367, 386, 390, and 394 (see, e.g., Ranjith-Kumar 2006, supra, which is hereby incorporated by reference in its entirety). In some embodiments, radical changes to amino acid sequence are avoided in the longer loop and helix located at the distal portion of the thumb domain and/or avoided in known polymerase motifs (described in Qin et al., supra).

[0129] In some embodiments, the polypeptide has HCV NS5B polymerase activity, i.e., effects RNA-dependent RNA synthesis. HCV NS5B polymerase activity can be determined using HCB NS5B polymerase reactions, such as those known in the art and/or described herein. Exemplary HCV NS5B polymerase reactions (i.e., assays) are described in, e.g., Ferrari et al., J. Biol. Chem., 283(49), 33893-33907 (2008), and Behrens et al., EMBO J., 15(1), 12-22 (1996), incorporated herein by reference in their entirety and for their teachings relative to polymerase reactions. For example, one suitable polymerase reaction involves exposing a polypeptide believed to have polymerase activity to RNA template in the presence of nucleotides and measuring the amount of RNA synthesized. The amount of RNA synthesized can be estimated via gel electrophoresis. Colorimetric assays for characterizing RNA polymerase activity also have been described (see, e.g., Lee et al., Bull. Korean Chem. Soc., 30(10), 2485-2488 (2009)). Steady-state kinetic parameters, such as Km, for nucleotide triphosphates and template/primer also are suitable for measuring polymerase activity (see, e.g., McKercher et al., Nucl. Acid Res., 32(2), 422-431 (2004), reporting that, for various NS5B constructs, the Km for UTP ranged from 1.8 to 12 μM and the Km for template/primer ranged from 25 to 214 nM).

[0130] RNA synthesis also can be characterized by employing labeled nucleotides (e.g., radiolabeled UTP) to produce a radioactive polymerase reaction product, which can be quantified using, e.g., a scintillation counter (see, e.g., Biswal et al., J. Mol. Biol., 361, 33-45 (2006)). In one embodiment, a scintillation proximity assay is performed, wherein a 5′ biotinylated DNA oligonucleotide (oligo dT) primer (e.g., a primer comprising 15 nucleotides) annealed to a homopolymeric poly rA RNA template is captured on the surface of streptavidin-coated bead. HCV NS5B polymerization activity is quantified by measuring the incorporation of radiolabeled [³H]UTP substrate onto the growing primer 3′ end using, e.g., a liquid scintillation counter.

[0131] The results of the HCV NS5B polymerase reaction can be compared to the level of RNA synthesis or kinetic parameters achieved by wild-type HCV NS5B polymerase (e.g., a polymerase comprising the amino acid sequence of SEQ ID NO: 1). In one aspect, the polymerase activity of inventive polypeptide is at least 50% of the polymerase activity demonstrated by a wild-type HCV NS5B polymerase (e.g., at least 60%, at least 70%, at least 75%, at least 80%, at least 85%, at least 90%, at least 95%, or 100% of the activity of wild-type HCV NS5B polymerase). Based on information gathered using polymerase reactions, one skilled in the art can readily determine the amino acids where further sequence variations should be avoided either alone or in combination with other mutations. One can screen any sequence variant to determine whether polymerase activity is retained.

[0132] The invention also provides an isolated peptide having no more than 50 amino acids (e.g., no more than 25 amino acids, no more than 15 amino acids, or no more than 10 amino acids) and comprising a sequence of 6-50 amino acids that is at least 90% identical to a portion of the amino acid sequence of SEQ ID NO: 3 encompassing at least one of amino acid residues 419, 423, 482, 486, and 494. When present, the amino acid(s) of the polypeptide that correspond(s) to amino acid residues 419, 423, 482, 486, and/or 494 of SEQ ID NO: 3 is identical to the corresponding amino acid(s) of SEQ ID NO: 3. To illustrate, an exemplary peptide consists of 50 amino acids comprising an amino acid sequence 90% identical to a region of SEQ ID NO: 1 encompassing amino acid position 419 as defined in SEQ ID NO: 1, wherein the amino acid at the position corresponding to position 419 of SEQ ID NO: 1 is cysteine, isoleucine, valine, or proline. Such peptides are useful in a variety of contexts, such as eliciting antibodies that specifically bind to an HCV NS5B polymerase that is resistant to a polymerase inhibitor, such as VX-222, as described in detail herein.

[0133] Compositions comprising the inventive polypeptide and a carrier also are specifically contemplated herein. The invention further provides an assay mixture comprising an isolated polypeptide as described herein and one or more components for an HCV polymerase reaction, such as RNA template, RNA primer(s), nucleotide triphosphates, and/or buffer.

### Polynucleotides

[0134] The invention further provides an isolated polynucleotide (e.g., a DNA molecule (e.g., cDNA or genomic DNA), RNA molecule (e.g., mRNA), or analog of DNA or RNA)) comprising a nucleic acid sequence encoding any of the polypeptides described herein, e.g., the polypeptide comprising (or consisting of) the amino acid sequence set forth in SEQ ID NOs: 3-502, and compositions comprising the polynucleotides and a carrier. For example, the invention provides an isolated polynucleotide comprising a nucleotide sequence encoding a polypeptide having HCV NS5B polymerase activity, the nucleotide sequence comprising at least one codon variation from SEQ ID NO: 2, the at least one codon variation from SEQ ID NO: 2 selected from the group consisting of: a codon encoding cysteine, isoleucine, valine, or proline at codon 419; a codon encoding alanine at codon 423; a codon encoding alanine, threonine, valine, or asparagine at codon 482; a codon encoding valine, isoleucine, threonine, or serine at codon 486; and a codon encoding isoleucine at codon 494, as the amino acid positions are defined in SEQ ID NO: 2. In various embodiments, the invention provides an isolated polynucleotide comprising a nucleotide sequence encoding a polypeptide having Hepatitis C Virus (HCV) NS5B polymerase activity, the nucleotide sequence comprising at least one codon variation from SEQ ID NO: 2, the at least one codon variation from SEQ ID NO: 2 selected from the group consisting of a codon encoding cysteine, isoleucine, valine, or proline at codon 419; a codon encoding alanine, valine, or asparagine at codon 482; a codon encoding valine, isoleucine, threonine, or serine at codon 486; and a codon encoding isoleucine at codon 494, as the codon positions are defined in SEQ ID NO: 2. For example, the invention provides an isolated polynucleotide comprising a nucleotide sequence that encodes at least one of the amino acid sequences selected from the group consisting of SEQ ID NOs: 4-502.

[0135] As noted above with respect to polypeptides, the polynucleotide can comprise a single variation at a codon encoding amino acid position 419, 423, 482, 486, or 496, or can comprise variations at two or more of the codons encoding amino acid positions 419, 423, 482, 486, and/or 496. For example, the polynucleotide can comprise a single variation at a codon encoding amino acid position 419, 482, 486, or 496. All combinations of codon variations encoding cysteine, isoleucine, valine, or proline at amino acid position 419; alanine at codon 423; alanine, threonine, valine, or asparagine at codon 482; valine, isoleucine, threonine, or serine at codon 486; and/or isoleucine at codon 494 are contemplated.

[0136] For example, the polynucleotide comprising a codon encoding cysteine, isoleucine, valine, or proline at the position in the nucleotide sequence corresponding to codon 419 of SEQ ID NO: 2 also can comprise: a codon encoding alanine at the position in the nucleotide sequence corresponding to codon 423 of SEQ ID NO: 2 and/or a codon encoding alanine, threonine, valine, or asparagine at the position in the nucleotide sequence corresponding to codon 482 of SEQ ID NO: 2 and/or a codon encoding valine, isoleucine, threonine, or serine at the position in the nucleotide sequence corresponding to codon 486 of SEQ ID NO: 2 and/or a codon encoding isoleucine at the position in the nucleotide sequence corresponding to codon 494 of SEQ ID NO: 2. Similarly, a polynucleotide comprising a codon encoding alanine at the position in the nucleotide sequence corresponding to codon 423 of SEQ ID NO: 2 also can comprise: a codon encoding cysteine, isoleucine, valine, or proline at the position in the nucleotide sequence corresponding to codon 419 of SEQ ID NO: 2 and/or a codon encoding alanine, threonine, valine, or asparagine at the position in the nucleotide sequence corresponding to codon 482 of SEQ ID NO: 2 and/or a codon encoding valine, isoleucine, threonine, or serine at the position in the nucleotide sequence corresponding to codon 486 of SEQ ID NO: 2 and/or a codon encoding isoleucine at the position in the nucleotide sequence corresponding to codon 494 of SEQ ID NO: 2. A polynucleotide comprising a codon encoding alanine, threonine, valine, or asparagine at the position in the nucleotide sequence corresponding to codon 482 of SEQ ID NO: 2 also can comprise: a codon encoding cysteine, isoleucine, valine, or proline at the position in the nucleotide sequence corresponding to codon 419 of SEQ ID NO: 2 and/or a codon encoding alanine at the position in the nucleotide sequence corresponding to codon 423 of SEQ ID NO: 2 and/or a codon encoding valine, isoleucine, threonine, or serine at the position in the nucleotide sequence corresponding to codon 486 of SEQ ID NO: 2 and/or a codon encoding isoleucine at the position in the nucleotide sequence corresponding to codon 494 of SEQ ID NO: 2. A polynucleotide comprising a codon encoding valine, isoleucine, threonine, or serine at the position in the nucleotide sequence corresponding to codon 486 of SEQ ID NO: 2 also can comprise: a codon encoding cysteine, isoleucine, valine, or proline at the position in the nucleotide sequence corresponding to codon 419 of SEQ ID NO: 2 and/or a codon encoding alanine at the position in the nucleotide sequence corresponding to codon 423 of SEQ ID NO: 2 and/or a codon encoding alanine, threonine, valine, or asparagine at the position in the nucleotide sequence corresponding to codon 482 of SEQ ID NO: 2 and/or a codon encoding isoleucine at the position corresponding to 494 of SEQ ID NO: 2. A polynucleotide comprising a codon encoding isoleucine at the position in the nucleotide sequence corresponding to codon 494 of SEQ ID NO: 2 also can comprise: a codon encoding cysteine, isoleucine, valine, or proline at the position in the nucleotide sequence corresponding to codon 419 of SEQ ID NO: 2 and/or a codon encoding alanine at the position in the nucleotide sequence corresponding to codon 423 of SEQ ID NO: 2 and/or a codon encoding alanine, threonine, valine, or asparagine at the position in the nucleotide sequence corresponding to codon 482 of SEQ ID NO: 2 and/or a codon encoding valine, isoleucine, threonine, or serine at the position in the nucleotide sequence corresponding to codon 486 of SEQ ID NO: 2.

[0137] In one embodiment, the polynucleotide comprising a codon encoding alanine at the position in the nucleotide sequence corresponding to codon 423 of SEQ ID NO: 2; a codon encoding alanine, threonine, valine, or asparagine at the position in the nucleotide sequence corresponding to codon 482 of SEQ ID NO: 2; a codon encoding valine, isoleucine, threonine, or serine at the position in the nucleotide sequence corresponding to codon 486 of SEQ ID NO: 2; and/or a codon encoding isoleucine at the position in the nucleotide sequence corresponding to codon 494 of SEQ ID NO: 2, also comprises a codon encoding methionine or serine at the position in the nucleotide sequence corresponding to codon 419 of SEQ ID NO: 2. Alternatively, the polynucleotide comprises a codon encoding cysteine, isoleucine, valine, or proline at the position in the nucleotide sequence corresponding to codon 419 of SEQ ID NO: 2; a codon encoding alanine, threonine, valine, or asparagine at the position in the nucleotide sequence corresponding to codon 482 of SEQ ID NO: 2; a codon encoding valine, isoleucine, threonine, or serine at the position in the nucleotide sequence corresponding to codon 486 of SEQ ID NO: 2; and/or a codon encoding isoleucine at the position in the nucleotide sequence corresponding to codon 494 of SEQ ID NO: 2, and further comprises a codon encoding isoleucine, threonine, alanine, or valine at the position in the nucleotide sequence corresponding to codon 423 of SEQ ID NO: 2. In another embodiment, the polynucleotide comprises a codon encoding cysteine, isoleucine, valine, or proline at the position in the nucleotide sequence corresponding to codon 419 of SEQ ID NO: 2; a codon encoding alanine at the position in the nucleotide sequence corresponding to codon 423 of SEQ ID NO: 2; a codon encoding valine, isoleucine, threonine, or serine at the position in the nucleotide sequence corresponding to codon 486 of SEQ ID NO: 2; and/or a codon encoding isoleucine at the position in the nucleotide sequence corresponding to codon 494 of SEQ ID NO: 2, and further comprises a codon encoding leucine or threonine at the position in the nucleotide sequence corresponding to codon 482 of SEQ ID NO: 2. The invention also includes a polynucleotide comprising a codon encoding cysteine, isoleucine, valine, or proline at the position in the nucleotide sequence corresponding to codon 419 of SEQ ID NO: 2; a codon encoding alanine, threonine, valine, or asparagine at the position in the nucleotide sequence corresponding to codon 482 of SEQ ID NO: 2; and/or a codon encoding valine, isoleucine, threonine, or serine at the position in the nucleotide sequence corresponding to codon 486 of SEQ ID NO: 2; and further comprises a codon encoding alanine at the position in the nucleotide sequence corresponding to codon 494 of SEQ ID NO: 2, and, optionally, a codon encoding alanine at the codon position in the nucleotide sequence corresponding to codon 423 of SEQ ID NO: 2. The polynucleotides described herein, in one aspect, further comprises a variation at codon position 422 such that codon encodes tyrosine.

[0138] DNA according to this invention may be derived from SEQ ID NO: 2. It will be appreciated that DNA sequences depicted with A, G, C, and T (adenine, guanine, cytosine, and thymine) are intended to also represent equivalent RNA sequences depicted as A, G, C, and U (adenine, guanine, cytosine, and uracil). Methods of preparing DNA and/or RNA molecules are well known in the art. In one aspect, a DNA or RNA molecule encoding a polypeptide provided herein is generated using chemical synthesis techniques and/or using polymerase chain reaction (PCR). The polynucleotide can be isolated from an HCV virus and amplified to provide a population of polynucleotides. In specific embodiments, site-directed mutagenesis of the sequence of SEQ ID NO: 2 is particularly contemplated in order to generate one or more of the polynucleotides described herein.

[0139] In a related embodiment, the invention provides an expression vector comprising a polynucleotide of the invention to direct expression of the polynucleotide in a suitable host cell. Such vectors are useful, e.g., for amplifying the polynucleotides in host cells to create useful quantities thereof, and for expressing peptides, such as polymerases, using recombinant techniques. In preferred embodiments, the expression vector comprises the inventive polynucleotide operatively linked to an expression control sequence. Autonomously replicating recombinant expression constructs such as plasmid and viral DNA vectors incorporating the inventive polynucleotides are specifically contemplated. As used herein, “expression vector” is not a native Hepatitis C Virus capable of infection and comprising an unmodified HCV genome. The polynucleotide of the invention is heterologous to the vector and/or linked to an expression control sequence that does not control NS5B polymerase expression in wild-type HCV. Optionally, the expression vector comprises a coding sequence for the inventive polypeptide in the absence of coding sequences for other HCV structural and/or nonstructural proteins (i.e., the expression vector does not comprise a polynucleotide encoding HCV proteins other than NS5B). Also optionally, the expression vector comprises all or part of the 3′ non-translated region of the HCV genome in addition to the polynucleotide of the invention. The 3′ non-translated region has a tripartite structure containing a variable region (comprising approximately 40 nucleotides), a poly (U/UC) tract, and the X tail (comprising approximately 98 nucleotides in length) (Friebe and Bartenschlager, J. Virol., 76(11), 5326-5338 (2002)).

[0140] The expression vector can be a viral vector or a non-viral vector (e.g., a plasmid). Exemplary viral vectors include, but are not limited to, retroviral vectors, including lentivirus vectors; parvoviral vectors, such as adeno-associated viral (AAV) vectors; adenoviral vectors; adenoviral adeno-associated chimeric vectors; vaccinia viral vectors; and herpesviral vectors. Any of these expression vectors can be prepared using standard recombinant DNA techniques described in, e.g., Sambrook et al., Molecular Cloning, a Laboratory Manual, 2d edition, Cold Spring Harbor Press, Cold Spring Harbor, N.Y. (1989), and Ausubel et al., Current Protocols in Molecular Biology, Greene Publishing Associates and John Wiley & Sons, New York, N.Y. (1994). Optionally, a viral vector is rendered replication-deficient by, e.g., deleting or disrupting select genes required for viral replication.

[0141] Expression control sequences include promoters, enhancers, and operators, and are generally selected based on the expression systems in which the expression construct is to be utilized. Preferred promoter and enhancer sequences are generally selected for the ability to increase gene expression, while operator sequences are generally selected for the ability to regulate gene expression. Expression constructs may also include sequences encoding one or more selectable markers that permit identification of host cells bearing the construct. Preferred expression constructs also include sequences necessary for replication in a host cell.

[0142] Exemplary expression control sequences include promoter/enhancer sequences, e.g., cytomegalovirus promoter/enhancer (Lehner et al., J. Clin. Microbiol., 29, 2494-2502 (1991); Boshart et al., Cell, 41, 521-530 (1985)); Rous sarcoma virus promoter (Davis et al., Hum. Gene Ther., 4, 151 (1993)); simian virus 40 promoter; and albumin promoter, the promoter being operatively linked to the polypeptide coding sequence. The inventive polynucleotides may also optionally include a suitable polyadenylation sequence (e.g., the SV40 or human growth hormone gene polyadenylation sequence) operably linked downstream (i.e., 3′) of the polypeptide coding sequence.

[0143] If desired, the polynucleotide of the invention also optionally comprises a nucleotide sequence encoding a secretory signal peptide fused in frame with the polypeptide sequence. The secretory signal peptide directs secretion of the polypeptide of the invention by the cells that express the polynucleotide, and is cleaved by the cell from the secreted polypeptide. The polynucleotide may further optionally comprise sequences whose only intended function is to facilitate large scale production of the vector, e.g., in bacteria, such as a bacterial origin of replication and a sequence encoding a selectable marker.

[0144] The invention further provides a cell that comprises the polynucleotide or the expression vector, e.g., the cell is transformed or transfected with a polynucleotide encoding the inventive polypeptide or an expression vector comprising the polynucleotide, and the cell expresses the polypeptide encoded by the polynucleotide. In one aspect, the cell is free of HCV infection. The cell may be a prokaryotic cell, such as Escherichia coli, or a eukaryotic host cell, such as an animal cell (e.g., a mammalian cell, such as a liver cell (hepatocyte), Chinese Hamster Ovary cell, or hybridoma cell), yeast (e.g., Saccharomyces cerevisiae), or a plant cell (e.g., a tobacco, corn, soybean, or rice cell). The host cell may be isolated and/or purified. The host cell may be a primary isolate or a cell from a cell line propagated ex vivo. The host cell may be an isolated cell transformed ex vivo and introduced into an animal post-transformation, e.g., to produce the polypeptide in vivo. The host cell also may be a cell transformed in vivo to cause expression of the polypeptide in vivo. Animal models expressing the inventive polypeptide can include any mammal other than a human, such as rabbits, rodents (e.g., mice, rats, hamsters, gerbils, and guinea pigs), cows, sheep, pigs, goats, horses, dogs, cats, birds (e.g., chickens, turkeys, ducks, and geese), and primates (e.g., chimpanzees, monkeys, and tamarinds).

[0145] Certain embodiments of the invention may employ nucleic acid fragments (oligonucleotides) that bind an HCV NS5B coding sequence or a complement thereof. For example, the invention provides an isolated polynucleotide comprising no more than 50 nucleotides and comprising a nucleotide sequence of 14-50 nucleotides complementary to a continuous portion of the nucleotide sequence of any of the polynucleotides described herein, the portion including at least one codon at a codon position selected from codon positions 419, 423, 482, 486, and 494 of SEQ ID NO: 2. In other words, the polynucleotide comprising no more than 50 nucleotides comprises at least one codon variation from SEQ ID NO: 2 selected from the group consisting of: a codon encoding cysteine, isoleucine, valine, or proline at codon 419; a codon encoding alanine at codon 423; a codon encoding alanine, threonine, valine, or asparagine at codon 482; a codon encoding valine, isoleucine, threonine, or serine at codon 486; and a codon encoding isoleucine at codon 494, as the amino acid positions are defined in SEQ ID NO: 2.

[0146] Oligonucleotides are useful as primers for the amplification of NS5B nucleic acid molecules. In this regard, oligonucleotides for use in the invention ideally comprise a sufficient number of nucleotide bases to be used in a polymerase chain reaction (PCR) reaction, and can be based on, or designed from, a genomic or cDNA sequence. Oligonucleotides also are useful as hybridization probes to identify (i.e., confirm or reveal) the presence of nucleic acids encoding the inventive polypeptide in a sample. “Probes” refer to nucleic acids derived from any contiguous portion of a nucleic acid sequence of choice. The length of a probe is preferably sufficient for specific hybridization to a nucleic acid sequence encoding NS5B polymerase (e.g., wild-type NS5B or any of the VX-222-resistant NS5B polymerases described herein). In this regard, the polynucleotide fragment is preferably capable of sequence-specific hybridization to a polynucleotide comprising a nucleotide sequence encoding a VX-222-resistant HCV NS5B polymerase, such as a polynucleotide comprising a nucleic acid sequence comprising the codon variations described herein. A nucleic acid probe can comprise as few as 5, 6, 7, 8, 9, or 10 nucleotides that bind to a nucleic acid sequence encoding the inventive polypeptide (or the complement thereof). Preferably, probes are about 15-100 nucleotides in length (e.g., about 15, 20, 25, 30, or 50 nucleotides), although it will be appreciated that probes can comprise as many as about 75, 100, 200, 250, or 500, depending on the desired specificity and conditions of the hybridization reaction.

[0147] Short nucleic acid molecules are easily generated synthetically, while longer polynucleotides may be obtained from a natural or recombinant source. Probes may be single- or double-stranded, and preferably are designed to have specificity in PCR, membrane-based hybridization technologies, or ELISA-like technologies. In some embodiments, a probe comprises a detectable label attached thereto, e.g., the probe is labeled with a radioisotope, a fluorescent compound, a biotin-avidin label, an enzyme, or an enzyme co-factor. A non-limiting example of a probe for detecting, e.g., RNA, is a labeled nucleic acid probe of sufficient length to specifically hybridize under stringent conditions to RNA.

### Antibodies

[0148] The invention provides an isolated antibody that selectively binds the polypeptide described herein. The term “antibody” refers to a complete (intact) antibody (immunoglobulin) molecule (including polyclonal, monoclonal, chimeric, humanized, or human versions having full length heavy and/or light chains) or an HCV NS5B polymerase-binding fragment thereof. Antibody fragments include F(ab′)2, Fab, Fab′, Fv, Fc, and Fd fragments, and can be incorporated into single domain antibodies, single-chain antibodies, maxibodies, minibodies, intrabodies, diabodies, triabodies, tetrabodies, v-NAR and bis-scFv (see, e.g., Hollinger and Hudson, Nature Biotechnology, 23(9), 1126-1136 (2005)). Antibody polypeptides, including monobodies, also are disclosed in U.S. Pat. No. 6,703,199. Other antibody polypeptides are disclosed in U.S. Patent Publication No. 20050238646.

[0149] The term “specifically binds” refers to the ability of the antibody or fragment thereof to bind to an HCV NS5B polymerase having a mutation at one or more of amino acid positions 419, 423, 482, 486, and/or 494 with greater affinity (e.g., at least 10, 15, 20, 25, 50, 100, 250, 500, 1000, or 10,000 times greater affinity) than it binds to an HCV NS5B polymerase having the amino acid sequence of SEQ ID NO: 1. In certain aspects, the antibody binds to an NS5B polymerase polypeptide comprising one or more mutations at amino acid positions 419, 422, 423, 482, 486, and/or 494 with an affinity of less than or equal to 1×10⁻⁷ M, less than or equal to 1×10⁻⁸ M, less than or equal to 1×10⁻⁹ M, less than or equal to 1×10⁻¹⁰ M, less than or equal to 1×10⁻¹¹ M, or less than or equal to 1×10⁻¹² M. Affinity may be determined by an affinity ELISA assay, a BIAcore™ assay (i.e., a surface plasmon resonance-based assay), a kinetic method, or an equilibrium/solution method. Preferably, the antibody distinguishes the HCV NS5B polymerase having one or more variations at positions 419, 423, 482, 486, and/or 494 from wild-type HCV NS5B polymerase, HCV NS5B polymerase not having the one or more variations, or HCV NS5B polymerase that is not resistant to VX-222. For example, in one aspect, the antibody or fragment thereof binds to a polypeptide of the invention with at least 10, 15, 20, 25, 50, 100, 250, 500, 1000, or 10,000 times greater affinity than it binds to an HCV NS5B polymerase not having the one or more amino acid variations described herein, e.g., an NS5B polymerase having the amino acid sequence of SEQ ID NO: 1.

[0150] Various procedures are known within the art for producing antibodies, any of which are suitable for production an antibody against an HCV NS5B polymerase having one or more mutations at amino acid positions 419, 423, 482, 486, and/or 494. The antibody or antibody fragment can be isolated from an immunized animal, synthetically made, or genetically-engineered. Antibodies to the inventive polypeptide can be obtained, for example, by immunizing an animal with the inventive polypeptide or fragment thereof, or by introducing into an animal an expression vector encoding the inventive polypeptide or fragment thereof to achieve protein production in vivo. Prior to administration in some instances, a peptide immunogen is covalent coupled to another immunogenic protein, for example, a carrier protein such as keyhole limpet hemocyanin (KLH) or bovine serum albumin (BSA), and/or combined with an adjuvant, such as Freund's complete or incomplete adjuvant. Polyclonal antibodies are typically raised in non-human animals such as rats, mice, rabbits, goats, cattle, or sheep, and also can be raised in a subhuman primate as described in, e.g., International Patent Publication WO 1991/11465 and Losman et al., Int. J. Cancer, 46, 310 (1990). Antibodies raised against a polypeptide of the invention can be screened against an HCV HS5B polymerase having the amino acid sequence of SEQ ID NO: 1 to select those antibodies that bind the polypeptide of the invention with greater affinity then they bind to the polypeptide of SEQ ID NO: 1. In preferred variations, no appreciable cross-reactivity with SEQ ID NO: 1 occurs.

[0151] An antibody or fragment thereof also can be genetically-engineered such that the antibody or antibody fragment comprises, e.g., a variable region domain generated by recombinant DNA engineering techniques. For example, a specific antibody variable region can be modified by insertions, deletions, or changes in the amino acid sequence of the antibody to produce an antibody of interest. In this regard, polynucleotides encoding complementarity determining regions (CDRs) of interest are prepared, for example, by using polymerase chain reaction to synthesize variable regions using mRNA of antibody-producing cells as a template (see, for example, Courtenay-Luck, “Genetic Manipulation of Monoclonal Antibodies,” in Monoclonal Antibodies: Production, Engineering and Clinical Application, Ritter et al. (eds.), page 166 (Cambridge University Press 1995); Ward et al., “Genetic Manipulation and Expression of Antibodies,” in Monoclonal Antibodies: Principles and Applications, Birch et al., (eds.), page 137 (Wiley-Liss, Inc. 1995); and Larrick et al., Methods: A Companion to Methods in Enzymology, 2, 106-110 (1991)). Antibody manipulation techniques allow construction of engineered variable region domains containing at least one CDR and, optionally, one or more framework amino acids from a first antibody and the remainder of the variable region domain from a second antibody. Such techniques are used, e.g., to humanize an antibody or to improve its affinity for a binding target.

[0152] Monoclonal antibodies are generated using a variety of techniques, such as those known in the art (see, for example, Coligan et al. (eds.), Current Protocols in Immunology, 1:2.5.12.6.7 (John Wiley & Sons 1991); Monoclonal Antibodies, Hybridomas: A New Dimension in Biological Analyses, Plenum Press, Kennett, McKearn, and Bechtol (eds.) (1980); Antibodies: A Laboratory Manual, Harlow and Lane (eds.), Cold Spring Harbor Laboratory Press (1988); and Picksley et al., “Production of monoclonal antibodies against proteins expressed in E. coli,” in DNA Cloning 2: Expression Systems, 2nd Edition, Glover et al. (eds.), page 93 (Oxford University Press 1995)). In one embodiment, the invention provides an isolated cell capable of producing a monoclonal antibody that selectively binds the polypeptide having NS5B polymerase activity described herein. Typically, monoclonal antibodies are produced by a hybridoma, and the invention provides a hybridoma that produces the inventive monoclonal antibody or antibody fragment. Production of antibodies via immunization of non-human mammals and production of monoclonal antibodies is further described in, e.g., U.S. Pat. No. 7,381,409.

[0153] Antibody fragments derived from an intact antibody can be obtained, e.g., by proteolytic hydrolysis of the antibody. For example, papain or pepsin digestion of whole antibodies yields a 5S fragment termed F(ab′)₂ or two monovalent Fab fragments and an Fc fragment, respectively. F(ab)₂ can be further cleaved using a thiol reducing agent to produce 3.5S Fab monovalent fragments. Methods of generating antibody fragments are further described in, for example, Edelman et al., Methods in Enzymology, 1: 422 Academic Press (1967); Nisonoff et al., Arch. Biochem. Biophys., 89: 230-244 (1960); Porter, Biochem. J., 73: 119-127, 1959; U.S. Pat. No. 4,331,647; and by Andrews, S. M. and Titus, J. A. in Current Protocols in Immunology (Coligan et al., eds), John Wiley & Sons, New York (2003), pages 2.8.1-2.8.10 and 2.10A.1-2.10A.5. Alternatively, such fragments may also be generated by recombinant genetic engineering techniques, such as those techniques known in the art and described herein.

### Screening Methods

[0154] The invention further provides a method for detecting the presence of drug-resistant HCV in a sample (e.g., HCV resistant to a polymerase inhibitor, such as VX-222). In one aspect, the method comprises determining the presence or absence of an HCV NS5B polypeptide with an amino acid sequence in which (i) at least one amino acid that corresponds to positions 419, 423, 482, 486, and/or 494 of SEQ ID NO: 3 is identical to the corresponding amino acid(s) of SEQ ID NO: 3, or (ii) at least one amino acid that corresponds to positions 419, 482, 486 and/or 494 of SEQ ID NO: 516 is identical to the corresponding amino acid(s) of SEQ ID NO: 516, wherein the presence of the amino acid(s) in the HCV NS5B protein indicates the presence of drug-resistant HCV. Alternatively or in addition, the method comprises determining the presence or absence of a polynucleotide in the sample, the polynucleotide comprising a nucleic acid sequence encoding HCV NS5B polymerase containing at least one codon selected from the group consisting of a codon encoding cysteine, isoleucine, valine, or proline at a position corresponding to codon position 419 of SEQ ID NO; 2; a codon encoding alanine at a position corresponding to codon 423 of SEQ ID NO: 2; a codon encoding alanine, threonine, valine, or asparagine at a position corresponding to codon 482 of SEQ ID NO: 2; a codon encoding valine, isoleucine, threonine, or serine at a position corresponding to codon 486 of SEQ ID NO: 2; and a codon encoding isoleucine at a position corresponding to codon 494 of SEQ ID NO: 2. For example, in one aspect, the method comprises determining the presence or absence of a polynucleotide comprising a nucleic acid sequence encoding HCV NS5B polymerase containing at least one codon selected from the group consisting of a codon encoding cysteine, isoleucine, valine, or proline at a position corresponding to codon position 419 of SEQ ID NO; 2; a codon encoding alanine, valine, or asparagine at a position corresponding to codon 482 of SEQ ID NO: 2; a codon encoding valine, isoleucine, threonine, or serine at a position corresponding to codon 486 of SEQ ID NO: 2; and a codon encoding isoleucine at a position corresponding to codon 494 of SEQ ID NO: 2. The presence of the codon(s) indicates the presence of drug-resistant HCV in the sample. The sample can be a biological sample, a sample taken from laboratory equipment, and the like.

[0155] The invention also provides method for determining whether an HCV-infected patient is infected with an HCV strain that has a decreased sensitivity to VX-222. The method comprises determining the presence or absence of the inventive polypeptide in a biological sample from the patient, wherein the presence of the polypeptide indicates infection with an HCV strain that has a decreased sensitivity to VX-222. Alternatively or in addition, the method comprises determining the presence or absence of the polynucleotide described herein in a biological sample from the patient, wherein the presence of the polynucleotide indicates infection with an HCV strain having a decreased sensitivity to VX-222. In some aspects, one or more samples are taken from a patient over the course of a treatment regimen to detect the emergence of HCV having resistance to a particular polymerase inhibitor, such as VX-222.

[0156] In various embodiments, the method for determining whether an HCV-infected patient is infected with an HCV strain that has a decreased sensitivity to VX-222 comprises determining the presence or absence in a sample of a polypeptide comprising an amino acid sequence comprising at least one variation from SEQ ID NO: 1, the at least one variation selected from the group consisting of cysteine, isoleucine, methionine, serine, valine, or proline at amino acid position 419; lysine at amino acid position 422; alanine, isoleucine, threonine, or valine at amino acid position 423; alanine, leucine, threonine, valine, or asparagine at amino acid position 482; valine, isoleucine, threonine, or serine at amino acid position 486; and isoleucine or alanine at amino acid position 494, as the amino acid positions are defined in SEQ ID NO: 1, wherein the presence of the polypeptide indicates infection with an HCV strain that has a decreased sensitivity to VX-222. Alternatively or in addition, the method comprises determining the presence or absence of a polynucleotide in a biological sample patient, the polynucleotide comprising a nucleic acid sequence encoding HCV NS5B polymerase containing at least one codon selected from the group consisting of a codon encoding cysteine, isoleucine, methionine, serine, valine, or proline at a position corresponding to codon position 419 of SEQ ID NO: 2; a codon encoding lysine at a position corresponding to codon position 422 of SEQ ID NO: 2; a codon encoding alanine, isoleucine, threonine, or valine at a position corresponding to codon position 423 of SEQ ID NO: 2; a codon encoding alanine, leucine, threonine, valine, or asparagine at a position corresponding to codon position 482 of SEQ ID NO: 2; a codon encoding valine, isoleucine, threonine, or serine at a position corresponding to codon position 486 of SEQ ID NO: 2; and a codon encoding isoleucine or alanine at a position corresponding to codon position 494 of SEQ ID NO: 2, wherein the presence of the polynucleotide indicates infection with an HCV strain having a decreased sensitivity to VX-222.

[0157] In the method, a biological sample obtained from a subject, such as a subject suspected of having or experiencing symptoms associated with HCV infection, a subject undergoing antiviral therapy, or a subject that responds poorly to antiviral therapy. Numerous methods of obtaining biological samples from subject (e.g., a human patient) are available and are appropriate in the context of the invention. Samples typically are isolated from blood, serum, urine, amniotic fluid, or tissue biopsies from, e.g., liver, muscle, connective tissue, or nerve tissue. Once obtained, cells from the sample are examined to detect the presence or absence of the polypeptide or polynucleotide. It will be appreciated that the polypeptide of the invention can be detected in a variety of ways. For example, in one embodiment, NS5B polymerase is isolated from a sample and subjected to amino acid sequencing, the results of which are compared to a reference amino acid sequence, such as the amino acid sequence of wild-type HCV NS5B polymerase (for instance, SEQ ID NO: 1) or HCV NS5B polymerase that is not resistant to VX-222. Immunoassays, e.g., immunofluorescent immunoassays, immunoprecipitations, radioimmunoasays, ELISA, and Western blotting, also can be used to determine the presence or the absence of the polymerase. (See, e.g., Puri et al., J. Virol., 83(13), 6347-6356 (2009).) Thus, in some embodiments, the method comprises contacting the sample with an antibody or fragment thereof that specifically binds the polypeptide and detecting binding of the antibody or fragment thereof to the polypeptide. The antibody or fragment thereof specifically (or preferentially) binds an HCV NS5B polymerase having a mutation at one or more of amino acid positions 419, 423, 482, 486, and 494, such as the antibodies or fragments thereof described herein.

[0158] Optionally, the method comprises obtaining nucleic acid sequence data from a biological sample. Indeed, in one aspect, the method further comprises sequencing one or more polynucleotides in the sample to determine the presence the polynucleotide. For many assays, it may be convenient to amplify the NS5B HCV nucleotide (or portion thereof) in the sample using techniques such as PCR. In this regard, a sample of DNA or RNA is obtained, and, if desired, the polynucleotide encoding NS5B polymerase is amplified by PCR. The sample is then examined. Suitable methods of directly analyzing a nucleic acid molecule include, for instance, denaturing high pressure liquid chromatography (DHPLC), DNA hybridization, computational analysis, automated fluorescent sequencing, clamped denaturing gel electrophoresis (CDGE), denaturing gradient gel electrophoresis (DGGE), mobility shift analysis, restriction enzyme analysis, heteroduplex analysis, chemical mismatch cleavage (CMC), RNase protection assays, use of polypeptides that recognize nucleotide mismatches, and direct manual sequencing. These and other methods are described in the art (see, for instance, Tabone et al., Nature Protocols, 1, 2297-2304 (2006); MacBeath et al., DNA Sequencing Protocols, 167, 119-152 (2001) (DOI: 10.1385/1-59259-113-2:119); Li et al., Nucleic Acids Research, 28(2):e1 (i-v) (2000); Liu et al., Biochem. Cell Bio., 80, 17-22 (2000); Burczak et al., Polymorphism Detection and Analysis, Eaton Publishing (2000); Sheffield et al., Proc. Natl. Acad. Sci. USA, 86, 232-236 (1989); Orita et al., Proc. Natl. Acad. Sci. USA, 86, 2766-2770 (1989); Church and Gilbert, Proc. Natl. Acad. Sci. USA, 81, 1991-1995 (1988); Cotton et al., Proc. Natl. Acad. Sci. USA, 85, 4397-4401 (1985); Myers et al., Science, 230, 1242-1246 (1985); Geever et al., Proc. Natl. Acad. Sci. USA, 78, 5081-5085 (1981); Flavell et al., Cell, 15, 25-41 (1978); Sanger et al., Proc. Natl. Acad. Sci. USA, 74, 5463-5467 (1977); and U.S. Pat. No. 5,288,644). In one embodiment, the presence of one or more codon variations is detected directly by sequencing the relevant site(s) of the DNA or RNA in the sample, e.g., regions of the polynucleotide corresponding to codon positions 419, 423, 482, 486, and/or 494 of SEQ ID NO: 2.

[0159] In one embodiment, detection of a polynucleotide encoding mutant NS5B polymerase can be accomplished using a hybridization method (see Current Protocols in Molecular Biology, Ausubel et al., eds., John Wiley & Sons (2007), including all supplements). The presence of mutant NS5B can be determined by sequence-specific hybridization of a nucleic acid probe specific for particular mutation within the NS5B polymerase coding sequence. In one aspect, the method comprises contacting polynucleotides in the sample with a nucleic acid probe specific for one or more of the codon variations within the nucleotide sequence of SEQ ID NO: 2 under conditions allowing sequence-specific hybridization of the nucleic acid probe with a target sequence, wherein hybridization of the nucleic acid probe to polynucleotides in the sample indicates the presence of drug-resistance HCV. As discussed above, a nucleic acid probe is a DNA molecule or an RNA molecule that hybridizes to a complementary sequence in genomic DNA, RNA, or cDNA. In some aspects, the presence of more than one codon variation in SEQ ID NO: 2 is determined by using multiple nucleic acid probes, each being specific for a particular variation. In this regard, another variation of the invention is a kit containing 2, 3, 4, 5, 6, or more different polynucleotides of this type, for detecting mutants at two or more of the codons described herein. The inventive method can comprise detecting a non-wild type codon in a position corresponding to codon positions 419, 423, 482, 486, and/or 494 of SEQ ID NO: 2, or combinations thereof, wherein (a) the codon corresponding to codon position 419 of SEQ ID NO: 2 encodes cysteine, isoleucine, valine, or proline; (b) the codon corresponding to codon position 423 of SEQ ID NO: 2 encodes alanine; (c) the codon corresponding to codon position 482 of SEQ ID NO: 2 encodes alanine, threonine, valine, or asparagine; (d) the codon corresponding to codon position 486 of SEQ ID NO: 2 encodes valine, isoleucine, threonine, or serine; (e) and the codon corresponding to codon position 494 of SEQ ID NO: 2 encodes isoleucine.

[0160] One of skill in the art has the requisite knowledge and skill to design a probe so that sequence-specific hybridization will occur only if a particular variation is present in a HCV NS5B polymerase coding sequence. By “sequence-specific hybridization” is meant that the probe(s) preferentially bind to a nucleic acid sequence encoding a polypeptide having HCV NS5B polymerase activity and comprising one or more of the variations from SEQ ID NO: 2 described herein. In some embodiments, specific hybridization is achieved using “stringent conditions,” which are conditions for hybridization and washing under which nucleotide sequences at least 60% identical to each other typically remain hybridized. It is appreciated in the art that stringent conditions can differ depending on sequence content, probe length, and the like. Generally, stringent conditions are selected to be about 5° C. lower than the thermal melting point (Tm) for a specific sequence at a defined ionic strength and pH. Tm is the temperature (under defined ionic strength, pH, and nucleic acid concentration) at which 50% of the probes complementary to the target sequence hybridize to the target sequence at equilibrium. Since target sequences are generally present at excess, 50% of the probes are occupied at equilibrium at Tm. Stringent conditions also may include a salt concentration less than about 1.0 M sodium ion, typically about 0.01 to 1.0 M sodium ion (or other salts) at pH 7.0 to 8.3 and the temperature is at least about 30° C. for short probes, primers, or oligonucleotides (e.g., 10 nucleotides to 50 nucleotides) and at least about 60° C. for longer probes, primers and oligonucleotides. Stringent conditions may also be achieved with the addition of destabilizing agents, such as formamide. A non-limiting example of stringent hybridization conditions are hybridization in a high salt buffer comprising 6×SSC, 50 mM Tr-is-HCl (pH 7.5), 1 mM EDTA, 0.02% PVP, 0.02% Ficoll, 0.02% BSA, and 500 mg/ml denatured salmon sperm DNA at 65° C., followed by one or more washes in 0.2×SSC, 0.01% BSA at 50° C.

[0161] Specific hybridization, if present, is detected using standard methods. For example, the probe can comprise a fluorescent moiety at its 3′ terminus, a quencher at its 5′ terminus, and an enhancer oligonucleotide to facilitate detection, as described by Kutyavin et al., Nucleic Acid Res., 34:e128 (2006). In this detection method, an enzyme cleaves the fluorescent moiety from a fully complementary detection probe, but does not cleave the fluorescent moiety if the probe contains a mismatch. The presence of a particular target sequence is signaled by the fluorescence of the released fluorescent moiety. Alternatively, polynucleotides from a sample are dot-blotted using standard methods, and the blot is contacted with one or more oligonucleotide probes specific for a variation conferring drug-resistance (see, for example, Saiki et al., Nature, 324, 163-166 (1986)). Similarly, arrays of oligonucleotide probes complementary to target nucleic acid sequence(s) can be employed. Oligonucleotide arrays typically comprise a plurality of different oligonucleotide probes coupled to a surface of a substrate (e.g., plastic, complex carbohydrate, or acrylic resin) in different known locations. Such arrays are generally produced using mechanical synthesis methods or light-directed synthesis methods, although other methods are known to the ordinary skilled practitioner (see, e.g., Lau et al., Hong Kong Med. J., 14(5), Suppl. 5, 4-7 (2008); Bier et al., Adv. Biochem. Eng. Biotechnol., 109, 433-53 (2008); Hoheisel, Nat. Rev. Genet., 7, 200-10 (2006); Fan et al., Methods Enzymol., 410, 57-73 (2006); Raqoussis & Elvidge, Expert Rev. Mol. Diagn., 6, 145-52 (2006); Mockler et al., Genomics, 85, 1-15 (2005), and references cited therein, the entire teachings of each of which are incorporated by reference herein). In another hybridization method, Northern analysis (see Current Protocols in Molecular Biology, Ausubel et al., eds., John Wiley & Sons (2007)) is used to detect RNA encoding mutant HCV NS5B polymerase in a sample. Specific hybridization between the nucleic acid probe and the polynucleotide in the sample indicates that drug-resistant HCV (e.g., HCV having resistance to a polymerase inhibitor, such as VX-222) is present.

[0162] An exemplary method of detecting HCV having resistance to a polymerase inhibitor is the cycling probe method described in, e.g., Suzuki et al., J. Clin. Microbiol., 48(1), 57-63 (2010). Cycling probe technology can detect single nucleotide polymorphisms in a target DNA sequence by using probe-adapted real-time PCR. The probe accommodates an RNA complementary to the target DNA that undergoes degeneration by RNase H once a DNA-RNA complex is formed. Two cycling probes labeled with different fluorescent dyes and a quencher are used to detect SNPs, each probe harboring RNA corresponding to the wild-type polynucleotide or the polynucleotide having the mutation of interest. When a probe fully anneals to a target sequence, RNase cleaves the probe, releasing the fluorescent dye from the quencher for detection. Cleavage by RNase does not occur where there is a mismatch between the probe and the target sequence, thereby allowing detection of variations at certain positions within a nucleotide sequence. (Suzuki et al., supra.)

[0163] Other assays appropriate for detecting mutant HCV in a sample include, but are not limited to, the restriction fragment length polymorphism (RFLP) assay, the 5′-nuclease (TaqMan) assay, the TaqMAMA assay, and ligase detection reaction (LDR), which are capable of detecting a single-nucleotide change in polymerase proteins, as described in, e.g., Shafer et al., J. Clin. Microbiol., 34(7), 1849-1853 (1996) (LDR); Allen et al., J. Clin. Microbiol., 37, 3338-3347 (1999) (RFLP and TaqMan); Li et al., Genomics, 83, 311-320 (2004) (TaqMAMA) (all of which are herein incorporated by reference in their entirety and specifically with respect to the descriptions of methods of detecting mutant polynucleotides). The RFLP assay is a PCR-based assay employing restriction endonucleases that cleave specific sequences within a target nucleic acid sequence, resulting in a specific set of DNA fragments. Changes in the DNA pattern visualized using, e.g., polyacrylamide gel electrophoresis, indicates one or more mutations within the nucleic acid sequence (Allen et al., supra). Similarly, the 5′-nuclease assay is a PCR-based assay that utilizes the exonuclease activity of Taq DNA polymerase to cleave a probe labeled with a fluorescent dye and quencher. When the probe hybridizes to a target sequence, Taq cleaves the probe to release the dye from the quencher, thereby generating a detectable signal (Allen et al., supra). TaqMAMA is an allele-specific PCR-based assay wherein PCR products are preferentially formed from DNA that contains a desired target nucleic acid sequence (Li et al., supra).

[0164] The invention also provides methods of using the polymerase (or polynucleotide encoding the polymerase) to, e.g., identify polymerase inhibitors. The term “polymerase inhibitor” as used herein means an agent (compound or biological) that is effective to inhibit the function of HCV polymerase in a mammal, such as a human or a non-human mammal. The invention encompasses a method for characterizing the HCV inhibitory activity of an agent. The method comprises performing an HCV NS5B polymerase reaction with the inventive polypeptide in the presence of an agent, and comparing polymerase activity in the presence of the agent with polymerase activity of the polypeptide in the absence of the agent. Optionally, the method further comprises performing an HCV NS5B polymerase reaction with the inventive polypeptide in the absence of the agent. HCV HS5B polymerase reactions are described above, and the effect of an agent on any parameter indicative of polymerase activity is appropriate. For example, in one embodiment, comparing polymerase activity comprises comparing the amount of polynucleotide generated by the NS5B polymerase reaction with the polypeptide in the presence of the agent with the amount of polynucleotide generated by the reaction in the absence of the agent, wherein a decrease in the amount of polynucleotide generated by the polypeptide in the presence of the agent is indicative of HCV inhibitory activity of the agent.

[0165] An exemplary assay for detecting the inhibitory effect of an agent on HCV NS5B polymerase uses the MultiScreen™ assay format, which evaluates the amount of radiolabeled UTP incorporated by a polymerase into a newly synthesized RNA using a homopolymeric RNA template/primer. Generally, agents are tested at a variety of concentrations in a reaction mixture comprising buffer (e.g., 20 mM Tris-HCl, pH 7.5, 5 mM MgCl₂, 1 mM DTT, 50 mM NaCl), polymerase (e.g., 400 ng of purified NS5B polymerase enzyme), and labeled nucleotides (e.g., 500 ng of polyrA/oligodT₁₅) (Canadian Life Technologies, Burlington, Ontario, Canada). RNA-dependent-RNA polymerase reactions are allowed to proceed for, e.g., 140 minutes at 22° C., after which the reactions are stopped by the addition of, e.g., 10 μL of 0.5 mM EDTA. Thereafter, a volume of 50 μL (25 μg) of sonicated salmon sperm DNA and 100 μL of a solution of 20% trichloroacetic acid-0.5% tetrasodium pyrophosphate at 4° C. is added to the mixture, which is incubated on ice for 30 minutes to ensure complete precipitation of nucleic acids. Samples are then transferred onto 96-well MultiScreen™ filter plates (Millipore Corp., Bedford, Mass., USA). The filter plates are washed with 600 μL 1% trichloroacetic acid-0.1% tetrasodium pyrophosphate per well, and dried 20 minutes at 37° C. A 50 μL volume of liquid scintillation cocktail (Wallac Oy, Turku, Finland) is added and the incorporated radioactivity is quantified using a liquid scintillation counter (Wallac MicroBeta Trilux, Perkin Elmer™, MA, USA). The reaction conditions described herein are exemplary and can be modified as needed by a practitioner.

[0166] The polypeptide having NS5B polymerase activity and one or more variations selected from the group consisting of cysteine, isoleucine, valine, methionine, serine, or proline at amino acid position 419; lysine at amino acid position 422; alanine, isoleucine, threonine, or valine at amino acid position 423; alanine, threonine, leucine, valine, or asparagine at amino acid position 482; valine, isoleucine, threonine, or serine at amino acid position 486; and isoleucine or alanine at amino acid position 494 (as the amino acid positions are defined in SEQ ID NO: 1), displays resistance against at least one polymerase inhibitor, such as VX-222. VX-222 is a NS5B polymerase inhibitor, described further in WO 2008/058393 and WO 2002/100851 (incorporated herein by reference in their entirety and particularly with respect to the description of polymerase inhibitors), represented by Formula (I) (free acid form), and its pharmaceutically acceptable salts, prodrugs, and solvates thereof.

[chemical structure]

[0167] As used herein, the phrase “pharmaceutically acceptable salt(s)” refers to the salts that are safe and effective for treatment of HCV infections. “Pharmaceutically acceptable salts” include, e.g., those derived from pharmaceutically acceptable inorganic and organic acids and bases. Examples of suitable acids include hydrochloric, hydrobromic, sulphuric, nitric, perchloric, fumaric, maleic, phosphoric, glycollic, lactic, salicylic, succinic, toleune-p-sulphonic, tartaric, acetic, trifluoroacetic, citric, methanesulphonic, formic, benzoic, malonic, naphthalene-2-sulphonic and benzenesulphonic acids. Other acids such as oxalic, while not themselves pharmaceutically acceptable, may be useful as intermediates in obtaining the compounds of the invention and their pharmaceutically acceptable acid addition salts. Salts derived from amino acids are also included (e.g. L-arginine, L-Lysine). Salts derived from appropriate bases include alkali metals (e.g. sodium, lithium, potassium), alkaline earth metals (e.g. calcium, magnesium), ammonium, NR4+ (where R is C1-4 alkyl) salts, aluminum, zinc, diethanolamine salts, choline and tromethamine. Pharmaceutically acceptable salts with various amino acids can also be used, and use of these amino acid salts is also within the scope of this invention. Suitable salts include, but are not limited to, sodium salt, lithium salt, potassium salt, tromethamine salt, hydrochloride salt, hydrobromide salt, hydroiodide salt, nitrate salt, sulfate salt, bisulfate salt, phosphate salt, acid phosphate salt, isonicotinate salt, acetate salt, lactate salt, and L-arginine salt. For a review on pharmaceutically acceptable salts, see Berge et al., J. Pharm. Sci., 66, 1-19 (1977), the contents of which are incorporated herein by reference.

[0168] As used herein, the phrase a “pharmaceutically acceptable prodrug” of VX-222 refers to a compound that may be converted under physiological conditions or by solvolysis to VX-222 or to a pharmaceutically acceptable salt of VX-222 prior to exhibiting its pharmacological effect in the treatment of HCV infections.

[0169] As used herein, the phrase a “pharmaceutically acceptable solvate” of VX-222 refers to a pharmaceutically acceptable solvate form of VX-222 that contains solvent molecule(s) and retains the biological effectiveness of VX-222. In the case of salts, prodrugs, or solvates of VX-222 that are solids, it is understood by those skilled in the art that these salts, prodrugs, and solvates may exist in different crystalline or amorphous forms, the use of all of which is also within the scope of the present invention.

[0170] The polypeptide may also have resistance to compounds that differ from VX-222 only in the presence of one or more isotopically enriched atoms. For example, compounds having the structure of Formula I except for the replacement of hydrogen by deuterium or tritium, or the replacement of a carbon by a 13C- or 14C-enriched carbon are contemplated. VX-222 may independently contain one or more asymmetric carbon atoms and thus may occur as racemates and racemic mixtures, single enantiomers, diastereomeric mixtures and individual diastereomers. All such isomeric forms of these compounds are expressly included in the present invention. Each stereogenic carbon may be of the R or S configuration.

[0171] A method for identifying an agent able to rescue or enhance the polymerase-inhibitory activity of VX-222 against an HCV NS5B polymerase having resistance to VX-222 is provided. The method comprises a) performing an HCV NS5B polymerase reaction with the inventive polypeptide in the presence of an agent and VX-222; and b) comparing polymerase activity of the polypeptide in the presence of the agent with polymerase activity of the polypeptide in the absence of the agent, wherein a decrease in HCV polymerase activity in the presence of the agent is indicative of the ability to rescue the polymerase-inhibitory activity of VX-222. In at least one aspect, the invention provides a method for identifying an agent able to rescue or enhance the polymerase-inhibitory activity of VX-222 against a resistant HCV NS5B polymerase comprising performing an HCV NS5B polymerase reaction with a polypeptide comprising an amino acid sequence comprising at least one variation from SEQ ID NO: 1, the at least one variation selected from the group consisting of cysteine, isoleucine, methionine, serine, valine, or proline at amino acid position 419; lysine at amino acid position 422; alanine, isoleucine, threonine, or valine at amino acid position 423; alanine, leucine, threonine, valine, or asparagine at amino acid position 482; valine, isoleucine, threonine, or serine at amino acid position 486; and isoleucine or alanine at amino acid position 494, as the amino acid positions are defined in SEQ ID NO: 1, in the presence of an agent and VX-222; and b) comparing polymerase activity of the polypeptide in the presence of the agent with polymerase activity of the polypeptide in the absence of the agent.

[0172] The invention also provides compositions that comprise the agents identified in the methods described herein to rescue or enhance the polymerase inhibitor activity of VX-222 and/or display HCV inhibitory activity, and uses of the agents. Such compositions may be used to pre-treat invasive devices to be inserted into a patient, to treat biological samples, such as blood, prior to administration to a patient, and for direct administration to a patient. The composition can be used to inhibit HCV replication and to lessen the risk of or the severity of HCV infection. The composition comprises the agent and a carrier, such as a pharmaceutically-acceptable carrier. According to a preferred embodiment, the agent is present in the composition in an amount effective to decrease the viral load in a sample or in a patient.

[0173] The agents utilized in the compositions and methods described herein may also be modified by appending appropriate functionalities to enhance selective biological properties. Such modifications are known in the art and include those which increase biological penetration into a given biological system (e.g., liver, blood, lymphatic system, and/or central nervous system), increase oral availability, increase solubility to facilitate administration by injection, alter metabolism, and/or alter rate of excretion.

[0174] It will be appreciated that the amount of an agent described herein for use in treatment will vary not only with the particular agent selected but also with the route of administration, the nature of the condition for which treatment is required and the age and condition of the subject. In general, however, a suitable dose will be in the range of from about 0.1 to about 750 mg/kg of body weight per day, for example, in the range of 0.5 to 60 mg/kg/day, or, for example, in the range of 1 to 20 mg/kg/day. The agent is conveniently administered in unit dosage form, for example containing 10 to 1500 mg, conveniently 20 to 1000 mg, most conveniently 50 to 700 mg of active ingredient per unit dosage form. The desired dose may be presented in a single dose or as divided doses administered at appropriate intervals, for example as two, three, four, five or more doses per day. The amount of active ingredient that may be combined with the carrier materials to produce a single dosage form will vary depending upon the subject and the particular mode of administration. A typical preparation will contain from about 5% to about 95% active compound (w/w), e.g., from about 20% to about 80% active compound.

[0175] In some embodiments, the agent should be administered to achieve peak plasma concentrations of the active ingredient of from about 1 to about 75 μM, about 2 to 50 μM, about 3 to about 30 μM. This may be achieved, for example, by the intravenous injection of a 0.1 to 5% solution of the active ingredient, optionally in saline, or orally administered as a bolus containing about 1 to about 500 mg of the active ingredient. Desirable blood levels may be maintained by a continuous infusion to provide about 0.01 to about 5.0 mg/kg/hour or by intermittent infusions containing about 0.4 to about 15 mg/kg of the active ingredient.

[0176] When the agents of the invention or pharmaceutically acceptable salts thereof are used in combination with a second therapeutic agent active against the same virus, the dose of each compound may be either the same as or differ from that when the agent is used alone.

[0177] While it is possible that, for use in therapy or treatment of objects, an agent may be administered as the raw chemical it is preferable to present the agent as a pharmaceutical composition. The invention further provides a pharmaceutical composition comprising one or more agents described herein or a pharmaceutically acceptable derivative thereof, together with one or more pharmaceutically acceptable carriers and, optionally, other therapeutic and/or prophylactic ingredients. The carrier(s) must be “acceptable” in the sense of being compatible with the other ingredients of the formulation and not deleterious to the recipient thereof.

[0178] Pharmaceutical compositions suitable for oral administration may conveniently be presented as discrete units such as capsules, cachets or tablets each containing a predetermined amount of the active ingredient; as a powder or granules; as a solution, a suspension or as an emulsion. The agent may also be presented as a bolus, electuary or paste. Tablets and capsules for oral administration may contain conventional excipients such as binding agents, fillers, lubricants, disintegrants, or wetting agents. The tablets may be coated. Oral liquid preparations may be in the form of, for example, aqueous or oily suspensions, solutions, emulsions, syrups or elixirs, or may be presented as a dry product for constitution with water or other suitable vehicle before use. Such liquid preparations may contain conventional additives such as suspending agents, emulsifying agents, non-aqueous vehicles (which may include edible oils), or preservatives.

[0179] The agents described herein may also be formulated for parenteral administration (e.g. by injection, for example bolus injection or continuous infusion) and may be presented in unit dose form in ampules, pre-filled syringes, small volume infusion or in multi-dose containers with an added preservative. The compositions may take such forms as suspensions, solutions, or emulsions in oily or aqueous vehicles, and may contain formulatory agents such as suspending, stabilizing and/or dispersing agents. Alternatively, the agent may be in powder form, obtained by aseptic isolation of sterile solid or by lyophilization from solution, for constitution with a suitable vehicle, e.g. sterile, pyrogen-free water, before use. A sterile injectable preparation may be a solution or suspension in a non-toxic parenterally-acceptable diluent or solvent, for example as a solution in 1,3-butanediol. Among the acceptable vehicles and solvents that may be employed are water, Ringer's solution, and isotonic sodium chloride solution. In addition, sterile, fixed oils are employed as a solvent or suspending medium. For this purpose, any bland fixed oil may be employed including synthetic mono- or di-glycerides. Fatty acids, such as oleic acid and its glyceride derivatives are useful in the preparation of injectables, as are natural pharmaceutically-acceptable oils, such as olive oil or castor oil, especially in their polyoxyethylated versions. Oil solutions or suspensions may also contain a long-chain alcohol diluent or dispersant, such as carboxymethyl cellulose or similar dispersing agents which are commonly used in the formulation of pharmaceutically acceptable dosage forms including emulsions and suspensions. Other commonly used surfactants, such as Tweens, Spans, and other emulsifying agents or bioavailability enhancers which are commonly used in the manufacture of pharmaceutically acceptable solid, liquid, or other dosage forms may also be used for the purposes of formulation.

[0180] For topical administration to the epidermis, the agents described herein may be formulated as ointments, creams or lotions, or as a transdermal patch. Such transdermal patches may contain penetration enhancers such as linalool, carvacrol, thymol, citral, menthol and t-anethole. Ointments and creams may, for example, be formulated with an aqueous or oily base with the addition of suitable thickening and/or gelling agents. Lotions may be formulated with an aqueous or oily base and will in general also contain one or more emulsifying agents, stabilizing agents, dispersing agents, suspending agents, thickening agents, or coloring agents.

[0181] Compositions suitable for topical administration in the mouth include lozenges comprising active ingredient in a flavored base, usually sucrose and acacia or tragacanth; pastilles comprising the active ingredient in an inert base such as gelatin and glycerin or sucrose and acacia; and mouthwashes comprising the agent in a suitable liquid carrier.

[0182] Pharmaceutical compositions suitable for rectal administration wherein the carrier is a solid are for example presented as unit dose suppositories. Suitable carriers include cocoa butter and other materials commonly used in the art, and the suppositories may be conveniently formed by admixture of the agent with the softened or melted carrier(s) followed by chilling and shaping in moulds. Compositions suitable for vaginal administration may be presented as pessaries, tampons, creams, gels, pastes, foams or sprays containing in addition to the agent such carriers as are known in the art to be appropriate.

[0183] For intra-nasal administration the agents may be incorporated into a liquid spray or dispersible powder or in the form of drops. Drops may be formulated with an aqueous or non-aqueous base also comprising one more dispersing agents, solubilizing agents or suspending agents. Liquid sprays are conveniently delivered from pressurized packs. For administration by inhalation, the agents are conveniently delivered from an insufflator, nebulizer or a pressurized pack or other convenient means of delivering an aerosol spray. Pressurized packs may comprise a suitable propellant such as dichlorodifluoromethane, trichlorofluoromethane, dichlorotetrafluoroethane, carbon dioxide or other suitable gas. In the case of a pressurized aerosol the dosage unit may be determined by providing a valve to deliver a metered amount.

[0184] Alternatively, for administration by inhalation or insufflation, the agent may take the form of a dry powder composition, for example a powder mix of the compound and a suitable powder base such as lactose or starch. The powder composition may be presented in unit dosage form in, for example, capsules or cartridges or e.g. gelatin or blister packs from which the powder may be administered with the aid of an inhalator or insufflator.

[0185] When desired the above described formulations adapted to give sustained release of the active ingredient may be employed.

[0186] In one embodiment, the invention provides a pharmaceutical composition comprising at least one agent described herein, which is administered to a subject or exposed to an object in combination with at least one additional agent chosen from viral serine protease inhibitors, viral polymerase inhibitors, viral helicase inhibitors, immunomodulating agents, antioxidant agents, antibacterial agents, therapeutic vaccines, hepatoprotectant agents, antisense agents, inhibitors of HCV NS2/3 protease, and inhibitors of internal ribosome entry site (IRES).

[0187] In another embodiment, there is provided a composition comprising a least one agent described herein and one or more additional agents chosen from viral serine protease inhibitors, viral polymerase inhibitors, viral helicase inhibitors, immunomodulating agents, antioxidant agents, antibacterial agents, therapeutic vaccines, hepatoprotectant agents, antisense agent, inhibitors of HCV NS2/3 protease and inhibitors of internal ribosome entry site (IRES).

[0188] In one combination embodiment, the compound and additional agent are administered sequentially. In another combination embodiment, the compound and additional agent are administered simultaneously. The combinations referred to herein may conveniently be presented for use in the form of a pharmaceutical formulation. Pharmaceutical formulations comprising a combination of the agent and at least one other active ingredient with a pharmaceutically acceptable carrier comprise a further aspect of the invention. The additional agents for the compositions and combinations include, for example, Ribavirin, amantadine, merimepodib, Levovirin, Viramidine, and maxamine.

[0189] The term “viral serine protease inhibitor” as used herein means an agent that is effective to inhibit the function of the viral serine protease including HCV serine protease in a mammal. Indeed, in one embodiment, viral serine protease inhibitor is a flaviviridae serine protease inhibitor. Inhibitors of HCV serine protease include, for example, those compounds described in International Patent Publication Nos. WO 1999/07733 (Boehringer Ingelheim), WO 1999/07734 (Boehringer Ingelheim), WO 2000/09558 (Boehringer Ingelheim), WO 2000/09543 (Boehringer Ingelheim), WO 2000/59929 (Boehringer Ingelheim), WO 2002/060926 (BMS), WO 2006/039488 (Vertex), WO 2005/077969 (Vertex), WO 2005/035525 (Vertex), WO 2005/028502 (Vertex) WO 2005/007681 (Vertex), WO 2004/092162 (Vertex), WO 2004/092161 (Vertex), WO 2003/035060 (Vertex), WO 2003/087092 (Vertex), WO 2002/18369 (Vertex), and WO 1998/17679 (Vertex). Specific examples of inhibitors of HCV NS3 protease include, but are not limited to, BILN-2061 (Boehringer Ingelheim) SCH-6 and SCH-503034/Boceprevir (Schering-Plough), VX-950/telaprevir (Vertex), ITMN-B (InterMune), GS9132 (Gilead), TMC-435350 (Tibotec/Medivir), ITMN-191 (InterMune), and MK-7009 (Merck) (all of which are hereby incorporated by reference in their entirety and particularly with respect to the discussion of protease inhibitors).

[0190] The term “viral polymerase inhibitors” as used herein means an agent that is effective to inhibit the function of a viral polymerase, including an HCV polymerase in a mammal. In one embodiment, viral polymerase inhibitor is a flaviviridae polymerase inhibitor. Inhibitors of HCV polymerase include non-nucleosides, for example, those compounds described in International Patent Publication Nos. WO 2003/010140 (Boehringer Ingelheim), WO 2003/026587 (Bristol Myers Squibb); WO 2002/100846, WO 2002/100851, WO 2001/85172 (GSK), WO 2002/098424 (GSK), WO 2000/06529 (Merck), WO 2002/06246 (Merck), WO 2001/47883 (Japan Tobacco), WO 2003/000254 (Japan Tobacco), and EP 1 256 628 A2 (Agouron). Other inhibitors of HCV polymerase include, for example, nucleoside analogs, such as those compounds described in International Patent Publication Nos. WO 2001/90121 (Idenix), WO 2002/069903 (Biocryst Pharmaceuticals Inc.), WO 2002/057287 (Merck/Isis), and WO 2002/057425 (Merck/Isis) (all of which are hereby incorporated by reference in their entirety and particularly with respect to the discussion of polymerase inhibitors). Specific examples of nucleoside inhibitors of an HCV polymerase, include R1626/R1479 (Roche), R7128 (Roche), MK-0608 (Merck), R1656 (Roche-Pharmas set), and Valopicitabine (Idenix). Other specific examples of inhibitors of HCV polymerase include, but are not limited to, JTK-002/003 and JTK-109 (Japan Tobacco), HCV-796 (Viropharma), GS-9190 (Gilead), and PF-868,554 (Pfizer).

[0191] The term “viral helicase inhibitors” refers to an agent that is effective to inhibit the function of a viral helicase, including a Flaviviridae helicase in a mammal. Indeed, in one embodiment, viral helicase inhibitor is a flaviviridae helicase inhibitor.

[0192] “Immunomodulatory agent” means those agents that are effective to enhance or potentiate the immune system response in a mammal. Immunomodulatory agents include, for example, class I interferons (such as α-, β-, δ- and Ω-interferons, x-interferons, consensus interferons and asialo-interferons), class II interferons (such as γ-interferons) and pegylated interferons. The term “class I interferon” as used herein means an interferon selected from a group of interferons that all bind to receptor type 1. This includes both naturally and synthetically produced class I interferons. Examples of class I interferons include, but are not limited to, α-, β-, δ- and Ω-interferons, τ-interferons, consensus interferons and asialo-interferons. The term “class II interferon” as used herein means an interferon selected from a group of interferons that all bind to receptor type II. Examples of class II interferons include γ-interferons. Interferon is available in pegylated and non pegylated forms. Pegylated interferons include PEGASYS™ and Peg-intron™

[0193] Antisense agents also may be administered in conjunction with the agent described herein. Antisense agents include, for example, ISIS-14803. Inhibitors of internal ribosome entry sites (IRES) include ISIS-14803 (ISIS Pharmaceuticals) and compounds described in International Patent Publication No. WO 2006/019831 (PTC therapeutics) (which is hereby incorporated by reference in its entirety and particularly with respect to the discussion of antisense).

[0194] In one embodiment, the additional active agent administered with the agent described herein is interferon α, ribavirin, silybum marianum, interleukin-12, amantadine, ribozyme, thymosin, N-acetyl cysteine or cyclosporin. In one embodiment, the additional agent is interferon α 1A, interferon α 1 B, interferon α 2A, or interferon α 2B.

[0195] The recommended dose of PEGASYS™ monotherapy for chronic hepatitis C is 180 mg (1.0 mL vial or 0.5 mL prefilled syringe) once weekly for 48 weeks by subcutaneous administration in the abdomen or thigh. The recommended dose of PEGASYS™ when used in combination with ribavirin for chronic hepatitis C is 180 mg (1.0 mL vial or 0.5 mL prefilled syringe) once weekly. The recommended dose of PEG-Intron™ regimen is 1.0 mg/kg/week subcutaneously for one year. The dose should be administered on the same day of the week. When administered in combination with Ribavirin, the recommended dose of PEG-Intron™ is 1.5 micrograms/kg/week. The daily dose of Ribavirin is 800 mg to 1200 mg administered orally in two divided doses. The dose should be individualized to the patient depending on baseline disease characteristics (e.g., genotype), response to therapy, and tolerability of the regimen.

[0196] The drug combinations of the present invention can be provided to a cell or cells, or to a human patient, either in separate pharmaceutically acceptable formulations administered simultaneously or sequentially, formulations containing more than one therapeutic agent, or by an assortment of single agent and multiple agent formulations. Regardless of the route of administration, these drug combinations form an anti-HCV effective amount of components of the pharmaceutically acceptable formulations.

[0197] Upon improvement of a patient's condition, a maintenance dose of an agent, composition or therapeutic combination may be administered, if desired. Subsequently, the dosage or frequency of administration, or both, may be reduced, as a function of the symptoms, to a level at which the improved condition is retained when the symptoms have been alleviated to the desired level, treatment should cease. Patients may, however, require intermittent treatment on a long-term basis upon any recurrence of disease symptoms.

[0198] According to another embodiment, the invention provides a method for treating a patient infected with a virus characterized by a virally encoded polymerase that is necessary for the life cycle of the virus by administering to said patient a pharmaceutically acceptable composition of this invention. Preferably, the virus is HCV and/or the patient is a human. Such treatment may completely eradicate the viral infection or reduce the severity thereof.

[0199] In yet another embodiment, a method of pre-treating a biological substance intended for administration to a patient is provided. The method comprises contacting the biological substance with a pharmaceutically acceptable composition comprising an agent identified as described herein. Such biological substances include, but are not limited to, blood and components thereof such as plasma, platelets, subpopulations of blood cells and the like; organs such as kidney, liver, heart, lung, etc; sperm and ova; bone marrow and components thereof, and other fluids to be infused into a patient such as saline, dextrose, etc.

[0200] A method of treating materials that may potentially come into contact with a virus characterized by a virally encoded polymerase necessary for its life cycle also is contemplated. The method comprises contacting the material with an agent identified as described herein. Such materials include, but are not limited to, surgical instruments and garments; laboratory instruments and garments; blood collection apparatuses and materials; and invasive devices, such as shunts and stents.

[0201] In another embodiment, the agent of the invention is a laboratory tool for isolating viral polymerase, such as HCV NS5B. The agent is attached to a solid support, which is contacted with a sample containing a viral polymerase under conditions that cause said polymerase to bind to the solid support. The polymerase is then eluted from the solid support. In one embodiment, the polymerase is a mutant HCV NS5B polymerase that is resistant to treatment by VX-222 as described herein. Exemplary polymerases includes those described herein as having variations at positions 419, 423, 482, 486, and/or 494 of SEQ ID NO: 1.

[0202] The invention is further described in the following examples. The examples serve only to illustrate the invention and are not intended to limit the scope of the invention in any way.

### EXAMPLES

### Example 1

[0203] This example describes a method of detecting polynucleotides encoding HCV NS5B polymerase and having one or more of the codon variations described herein.

[0204] VX-222 is a non-nucleoside hepatitis C virus (HCV) NS5B polymerase inhibitor with potent in vitro activity. Safety, antiviral activity, and viral sequences were assessed in a phase Ib/IIa multicenter, randomized, dose-ascending study in genotype 1, HCV-infected patients.

[0205] Treatment-naïve HCV genotype 1 patients (n=32) were randomized to receive VX-222 at doses of 250 mg BID, 500 mg BID, 750 mg BID, or 1500 mg QD for 3 days, in a treatment:placebo ratio of 6:2 (8 patients/cohort). Pegylated interferon (Peg-IFN) and ribavirin (RBV) for 48 weeks was offered to patients at the end of the study. Sequencing of NS5B was performed at baseline (Day 1), end of dosing (Day 3), and at follow-up timepoints (Days 4, 5, 10, 20, and 60). Phenotypic data (fold change in IC50 from wildtype) of substitutions selected in patients during dosing was determined using a replicon system.

[0206] The mean HCV RNA decline achieved after three days of dosing with 250 mg, 500 mg, 750 mg, and 1500 mg of VX-222 was 3.1, 3.4, 3.2, and 3.4 log 10, respectively. The most common reported adverse effects (AEs) were diarrhea, headache, nausea, fatigue and fever. The majority of AEs were mild in severity.

[0207] NS5B polynucleotide was directly sequenced from all subjects at all time points. No subtype dependent differences were identified in the variants. In other words, the genotype 1a and genotype 1b viruses contained the same variations in amino acid sequence. Sequencing results showed substitutions at 6 positions in NS5B polymerase at the end of dosing: substitution of cysteine, methionine, proline, serine, or valine for leucine at amino acid position 419 (L419C/M/P/S/V); substitution of lysine for arginine at amino acid position 422 (R422K); substitution of isoleucine, threonine, or valine for methionine at amino acid position 423 (M423I/T/V); substitution of leucine, asparagine, or threonine for isoleucine at amino acid position 482 (1482L/N/T); substitution of isoleucine or valine for alanine at amino acid position 486 (A486I/V); and substitution of alanine for valine at amino acid position 494 (V494A). Phenotypic analyses of these variants showed a range of decreased sensitivity to VX-222 (˜6-80 fold change in IC50). For example, substitution at position 494 resulted in about a six-fold change in IC50, substitution at position 423 resulted in about a seven to ten-fold change in IC50, substitution at position 482 resulted in about a 26-fold change in IC50, substitution at position 419 resulted in about a 20-80-fold change in IC50, substitution at position 486 resulted in about a 50-fold change in IC50, and substitution at position 422 resulted in about a 74-fold change in IC50. The majority of subjects who were above the limit of detection of the sequencing assay had variants at the end of dosing. In most patients, only wild-type virus was detected at Day 10 of follow-up. Variants did not have reduced sensitivity to IFN, RBV, or other classes of STAT-Cs tested (e.g., polymerase or protease inhibitors) in vitro.

[0208] VX-222 produced a mean HCV RNA decline of greater than 3 log 10 in all four dose groups. The most common reported AEs were diarrhea, headache, nausea, fatigue and fever. Substitutions associated with decreased sensitivity to VX-222 were observed in the NS5B gene in the majority of patients after dosing with VX-222. While the fold change in IC50 to VX-222 conferred by these substitutions varied, they remained sensitive to IFN, RBV, and other classes of STAT-Cs. Variants were less fit than wild-type virus, and in the majority of patients the viral population returned to wild-type virus during the follow-up period.

### Example 2

[0209] This example describes the construction of an exemplary expression vector for producing HCV NS5B polymerase protein.

[0210] An HCV NS5B polymerase (genotype 1a) having a C-terminal truncation of 21 amino acids was amplified by PCR using the Vent DNA polymerase (New England BioLabs Inc., Mississauga, ON, Canada) and a DNA template, pHCV1/SF919 (National Center for Biotechnology Information (NCBI) database accession number AF271632). The two primers used for the amplification were 1A5BH5 (5′-GCT AGG GCT AGC CAC CAC CAC CAC CAC CAC TCA ATG TCT TAC TCT TGG AC (SEQ ID NO: 504)) and 1A5BR4 (5′-CTC GAC CTC GAG TCA GCG GGG CCG GGC ATG AGA CAC (SEQ ID NO: 505)). Primer 1A5BH5 contains one Nhe I site followed by a series of six codons encoding a hexahistidine tag and the first amino acid of HCV NS5B polymerase from HCV genotype 1a. Primer 1A5BR4 contains one Xho I restriction site and sequence complementary to the last 21 nucleotides of the genotype 1a NS5B protein lacking the 21 amino acids at the C-terminal end. The PCR product obtained was first cloned into the intermediate vector pGEM-T (Promega Corp., Madison, Wis., USA). One clone was completely sequenced. A restriction fragment (Nhe I-Xho I) of 1737 base pairs (bp) was then sub-cloned into the expression vector pET-24d (Novagen Corp., Madison, Wis., USA) predigested with the identical set of restriction enzymes to generate an expression construct encoding HCV NS5B polymerase. pET-21b (Novagen Corp., Madison, Wis., USA) also is a suitable parent plasmid for constructing NS5B polymerase expression constructs.

### Example 3

[0211] This example describes the generation of an expression vector of the invention and a cell line of the invention for producing a polypeptide of the invention and HCV replicon cells. Methods for screening HCV NS5B polymerase protein and mutant HCV also are described.

### Plasmid Construction and Production of Recombinant Polymerase

[0212] All mutations were introduced into the pFKI389/NS3-3′/adapt vector (Krieger et al., J. Virol., 75, 4614-4624 (2001); Lohmann et al., J. Virol., 77, 3007-3019 (2003)) by PCR-based site-directed mutagenesis and standard recombinant DNA technologies. The pFKI389/NS3-3′/adapt vector is a “cell culture adapted HCV replicon” containing a R465G mutation within the NS5B gene, and was obtained from Reblikon GmbH, Gau-Odernheim, Germany. The “cell culture adapted replicon” was chosen instead of the wild-type replicon because the R465G mutation was found in all of the progeny RNA isolated from 9.13 replicon cells used in drug susceptibility studies to compare the fold shift in IC50s (described further below). The adaptive R465G mutation in the NS5B region was previously reported (Krieger et al., supra) and found to be very efficient in generating replicon cell colonies after RNA transfection into Huh-7 cells.

[0213] For in vitro fitness studies, mutations were also introduced into the pFKI389Luc/NS3-3′/5.1 vector, which contains the firefly luciferase gene instead of neo-gene and harbors the cell culture adaptive mutations of clone NK5.1 (Krieger et al., supra; Lohmann et al., supra). The integrity of all constructs was confirmed by double-stranded DNA sequencing

[0214] Linearized plasmids with Sca I and Ase I restriction enzymes were utilized to generate in vitro transcripts using the T7 MEGAScript Kit® and purified with the MEGAclear™ purification kit (Ambion, Austin, Tex., USA). RNA concentration was determined by measuring the optical density at 260 nm, and the RNA integrity was verified by subjecting the nucleic acid materials to denaturing agarose gel electrophoresis.

### Cell Lines and Stable HCV Genotype 1b Replicon Cells

[0215] The hepatocarcinoma Huh-7 cell line, the HCV replicon cell line Huh-7 9.13 (9.13 replicon cells), and the Huh-7-ET replicon cell line were obtained from Reblikon GmbH, Gau-Odernheim, Germany. Briefly, 9.13 replicon cells are derived from stably transfected Huh-7 cells with the HCV sub-genomic replicon 1377/N53-3′/wt (Lohmann et al., Science, 285, 110-113 (1995)). The Huh-7-ET cell line contains the cell culture-adapted replicon pFKI389luc-ubi-neo/NS3-3′/5.1 construct that carries, in addition to the neomycin gene, an integrated copy of the firefly luciferase gene (Vrolijk et al., J. Virol. Methods, 110(2), 201-209 (2003)). A Huh-7 sub-cell line (“ET-cured” cells) was established by “curing” the Huh-7-ET cell line containing the subgenomic replicon pPK 1389luc-ubi-neo/NS3-3′/5.1 by prolonged treatment (three weeks) with the human interferon alpha 2a without geneticin (G418) selection. The lack of residual replicon RNA in these cells was confirmed by RT-PCR and by cell-death upon treatment with low concentrations of G418.

### Stable HCV Genotype 1a Replicon Cells

[0216] A selectable subgenomic replicon of the HCV genotype 1a (named 1a-Neo-1a) was constructed using a three-step cloning procedure. Briefly, the IRES region from genotype 1a was amplified by PCR following cDNA synthesis using RNA extracted from a commercial-source of genotype 1a-infected serum. Using the diluted cDNA, a PCR product of approximately 320 bp was amplified using oligonucleotides 1a-IRES-H2 (5′-CAG CAT AAG CTT CGT AAT ACG ACT CAC TAT AGC CAG CCC CCT GA (SEQ ID NO: 506)) and 5′-NCR-R12 (5′-CAC TCG CAA GCA CCC TAT CA (SEQ ID NO: 507)). The product was cloned into pFK I377/NS3-3′/wt(19) to replace the IRES of genotype 1b with the IRES from genotype 1a. The resulting plasmid, named replicon 1a-Neo-1b, was used in the final cloning step in which the complete non-structural protein sequence and 3′ non-translated region from genotype 1b were replaced with those from genotype 1a. The complete fragment encompassing the non structural proteins (NS3 to the NS5B) from the Kpn I restriction site (located within the ECMV IRES) to the Spe I restriction site (located at the far 3′ end of the non-coding region) was synthesized commercially (Integrated DNA Technologies, Inc., Coralville, Iowa, USA). This sequence was based on the H77 sequence (GenBank NC_{—}004102 (Kolykhalov et al., J. Virol., 74(4), 2046-2051 (2000)) with minor sequence modifications, including the adaptive amino acid changes P1496L and S2204I (amino acids numbers refer to the location within the H77 full-length HCV genome (Yi et al., Proc. Natl. Acad. Sci., 103, 2310-5 (2006)). The final cloning step leading to replicon 1a-Neo-1a comprised cloning the Kpn I-Spe I from the synthetically synthesized DNA to replace the equivalent sequence in replicon 1a-Neo-1b.

[0217] RNA for replicon 1a-Neo-1a was synthesized with T7 MEGAScript reagents (Ambion, Austin, Tex., USA) after linearizing the corresponding replicon plasmid with Hpa I. Following treatment with RNase-free DNase to remove template DNA and purification with MEGAclear kit (Ambion), the RNA (0.01 to 1 μg) was transfected into the ET-cured cells by electroporation. The transfected cells were plated in T-75 flasks for selection of G418-resistant colonies. The medium was replaced with DMEM-10% FBS supplemented with 500 μg G418/mL 48 h post transfection. Media was then replaced every four days. Three weeks later, well isolated colonies were isolated and expanded for further analysis by real time PCR analysis. One stably transfected clone with replicon 1a-Neo-1a, named clone W11.8, was chosen and progeny RNA was analyzed and sequenced to confirm that no modifications were present within the polymerase sequence.

[0218] All cell lines were maintained in cultures at a sub-confluent level (<85%) as the level of replicon RNA is higher in actively proliferating cells. Cell lines were maintained in Dulbecco's modified Eagle minimal essential medium (DMEM) supplemented with 10% fetal bovine serum, 100 IU/mL of penicillin, 100 μg/mL streptomycin, non-essential amino acids, 2 mM glutamine, and 10 mM HEPES (Wisent Inc., St-Bruno, QC, Canada). Cells were incubated at 37° C., in an atmosphere of 5% CO₂ and passaged twice a week to maintain sub-confluence. The 9.13 replicon and other recombinant replicon cells were maintained in media containing 600 μg/mL of G418 (Invitrogen).

[0219] Stable replicon cells were generated using T7 transcripts derived from the individual recombinant plasmids as described (Lohmann et al., Science, 285, 110-113 (1999)). Following selection with G418 and expansion of selected colonies, total RNA was extracted and used to generate cDNAs. Amplification by PCR was then performed to amplify the region of interest, and mutations were confirmed by sequencing. One to three independent recombinant replicon stable cell lines were used for the IC50 determination of VX-222 and compared side by side with the wild-type parental 9.13 replicon cells.

### HCV Replicon Cell Assay to Determine Sensitivity to Agents Using Real-Time PCR

[0220] The 9.13 replicon cells and the stable recombinant replicon cells were seeded in a 12-well culture dish at a density of 3×10⁴ cells/well in a volume of 1 mL. The cell culture media used for the assay was DMEM supplemented with 10% fetal bovine serum, 100 IU/mL of penicillin, 100 μg/mL streptomycin, non-essential amino acids, 2 mM glutamine and 10 mM HEPES. After incubating for 3-4 hours, candidate agents (drugs) were added at various concentrations for a final volume of 2 mL of the same culture media. Cells were incubated for 4 days at 37° C. with 5% CO₂. Thereafter, total RNA (cellular and viral origin) was extracted using the RNeasy kit (Qiagen Inc.) according to the manufacturer's protocol. cDNA synthesis was performed using the MMLV reverse transcriptase and random hexamer primer (Invitrogen). The inhibitory effect of agents against wild-type replicon cells, resistant colonies, or recombinant replicon cells was determined by monitoring the levels of HCV RNA, normalized to cellular 18S ribosomal RNA, by real time PCR using the ABI PRISM® 7700 Sequence Detection System (Applied Biosystems, Foster City, Calif., USA).

[0221] The 50% inhibitory concentrations (IC50s) for agents were determined from dose response curves using six to ten concentrations per agent in triplicate. Curves were fitted to data points using nonlinear regression analysis, and IC50s were interpolated from the resulting curve using GraphPad Prism software, version 2.0 (GraphPad Software Inc., San Diego, Calif., USA).

### Replication Capacity of HCV Recombinant Variants

[0222] For electroporation, single-cell suspensions of “ET-cured cells” were prepared, washed once with phosphate-buffered saline, counted, and resuspended at a concentration of 10⁷ cells/mL in Cytomix transfection buffer (Lohmann et al., supra). Transcripts (10-20 μg) were mixed with 400 μL of cell suspension by pipetting, electroporated, and transfected cells were immediately resuspended in 40 mL complete DMEM culture medium as described above except that G418 or phenol red was not present. In this methodology, cells were subjected to electroporation using a Gene Pulser System (Bio-Rad, Mississauga, ON, Canada) in a cuvette with a gap width of 0.4 cm (Bio-Rad) under conditions applying 960 μF and 270 volts. Resuspended cells were seeded in white opaque 96-well microtiter plates (100 μL cell suspension per well out of 40 mL). Cells were then further incubated for a time period of four hours to four days at 37° C. in a 5% CO₂ incubator. For each time point post-transfection, the culture media was removed and cells were lysed by the addition of 95 μL of luciferase buffer (luciferin substrate in buffered detergent). Thereafter, cell lysates were incubated at room temperature, protected from direct light, for at least 10 minutes. Plates were read for luciferase counts using a luminometer (Perkin Elmer, MA, USA). At least two measurements were performed for all luciferase assays. Replication capacity of all recombinant variants were determined as the ratio of the luciferase signal at four days post-transfection divided by the luciferase signal at four hours post-transfection to normalize for the transfection efficiency. The replication capacity (fitness) of the HCV replicon mutants was expressed as their normalized replication efficiency compared to that of the wild type which was set at 100%.

### Selection and Characterization of Drug-Resistant HCV Replicon Progeny

[0223] Drug-resistant HCV replicons were selected as previously described. (See, e.g., Amparo et al., 46th Conference on Antimicrobial Agents and Chemotherapy (ICAAC). 2006, Abstract 1273; Le Pogam et al., J. Virol., 80(12), 6146-54 (2006); Lin et al., J. Biol. Chem., 279(17), 17508-17514 (2004); Lu et al., Antimicrob. Agents Chemother., 48(6), 2260-2266 (2004); Trozzi et al., J. Virol., 77, 3669-3679 (2003)). Briefly, approximately 2.5×10⁴ genotype 1a replicon cells (W11.8 replicon cells at passage 13) or genotype 1b replicon cells (9.13 replicon cells at passage greater than 100) were plated in 75 cm² cell culture flasks (Falcon 353136) in complete culture medium with high concentration of G418 (600 μg/mL). Once the cells were fully adhered, the culture medium was supplemented with various concentrations of VX-222 (ranging from 7 to 220-fold the IC50 value in replicon cells as evaluated by real time PCR). In addition, untreated cells were maintained in culture during the course of the experiment as negative control.

[0224] Media and drugs were replaced twice a week over the course of the experiment. Three to four weeks following the initial plating, resistant clones of cells (colonies) were counted and randomly picked for culture or for direct RNA extraction. In most cases, cells were expanded for a few passages in the presence of G418 but without VX-222. In other cases, colonies were directly used for the RNA extraction using a glass cloning cylinder (Bel-Art Products, Pequannock, N.J., USA).

[0225] Following random selection of colonies and cell growth, total RNA was extracted from individual clones using the RNeasy kit according to the manufacturer's protocol (Qiagen Inc., Mississauga, ON, Canada). Total cellular RNA (1-2 μg) from treated or untreated replicon cells was subjected to reverse transcription (RT) using the Moloney Murine Leukemia Virus (MMLV) RT enzyme and random primers (Invitrogen). This step was followed by PCR amplification of the C-terminal NS5B coding region using the appropriate pairs of oligonucleotides described in Table 1.

TABLE 1

| Name | 5′-Position | Polarity | Sequence (5′ to 3′) |
|---|---|---|---|
| 5B-H21 | 6493 ^{a} | + | GTT CGT GTG TGC GAG AAA ATG |
| | | | (SEQ ID NO: 508) |
| 3′-NCR-R9 | 7808 ^{a} | - | GAG GAT GGC CTA TTG GCC TGG A |
| | | | (SEQ ID NO: 509) |
| 5B-H9 ^{c} | 6733 ^{a} | + | CCC GAA GCC AGA CAG GCC ATA |
| | | | (SEQ ID NO: 510) |
| 1a-5BH2 | 8098 ^{b} | + | CGT GCG CGT GTG CGA GAA GAT G |
| | | | (SEQ ID NO: 511) |
| 1a-3′-NCR-R2 | 9403 ^{b} | - | AAG AGG CCG GAG TGT TTA CCC CAA C |
| | | | (SEQ ID NO: 512) |
| 1a-5B-R1 | 9376 ^{b} | - | TCA TCG GTT GGG GAG GAG GTA GAT |
| | | | (SEQ ID NO: 513) |

^{a} Relative to HCV subgenomic replicon I377/NS3-3′/wt
^{b} Relative to HCV H77 full-length
^{c} Oligonucleotides used for sequencing the PCR products

[0226] The C-terminal two-thirds of the NS5B coding sequence was amplified using 1a-5BH2 and 1a-3′-NCR-R2 as specific primers for the genotype 1a replicon RNA (PCR product size of 1306 bp). The PCR products were sequenced using 1a-5B-R1 sequencing primer. For the genotype 1b replicon RNA, the 5B-H21 and 3′NCR-R9 specific primers were used (PCR product size of 1316 bp). The resulting PCR products were sequenced using 5B-H9 sequencing primer. This strategy allowed complete sequencing of the region spanning from amino acids 262 to 578 for genotype 1a and from amino acids 259 to 591 for genotype 1b, which largely covers the thiophen binding-pocket.

[0227] The high-fidelity DNA polymerase Phusion Hot Start was used to amplify the cDNA according to the manufacturer's protocol (Finnzymes Oy, Epsoo, Finland). PCR conditions were as followed: each reaction took place in a final volume of 50 μl containing 1× high-fidelity buffer, 2 mM MgCl₂, 200 μM each dNTP, 0.5 μM of each primer, 3% DMSO, 1 unit of Phusion Hot Start DNA polymerase, and 1-2 μl of cDNA. A standard reaction condition was used for the great majority of all PCRs: an initial step at 98° C. for 2 min, followed with cycling for 38 to 40 cycles with 98° C. for 30 sec, 55° C. for 20 sec, 72° C. for 1 min, and a final elongation step at 72° C. for 10 min. Sequencing of the RT-PCR products, using specific primers located within the NS5B region, was carried out on an Applied Biosystems ABI 310 sequencer (McGill University and Génome Québec Innovation Centre, Montréal, QC, Canada).

### Results

[0228] Mutant replicons resistant to specific inhibitors were made using replicon constructs expressing the neomycin phosphotransferase gene (NPT). The method capitalized on two features of replicons. First, the low fidelity of replicon replication in tissue culture causes the accumulation of mutations, which leads to a degree of genetic diversity sufficient to mimic the complexity of the HCV quasispecies in infected patients. Second, the survival of replicon cells in the presence of G418 is dependent on replicon-driven expression of NPT. Cells containing mutant replicons with decreased sensitivity to an inhibitor give rise to colonies that can be counted, isolated, expanded and characterized.

[0229] The results of two typical experiments for the selection of resistant colonies using both replicon cells of genotype 1a and 1b are provided in the tables in FIGS. 2A and 2B. The higher the concentration of VX-222 used for selection, the lower the number of surviving colonies, indicating that mutations conferring resistance were favored in the progeny HCV as a result of exposure to inhibitors. No colony could be readily detected for replicons of genotype 1b exposed to a VX-222 concentration of about 300 fold of the IC50, indicating that no mutants could be selected when VX-222 concentration exceeded a certain value (e.g., 300 fold the IC50 for genotype 1b).

[0230] The frequency of resistant clones at an equivalent IC50-fold concentration of VX-222 was higher for the genotype 1b replicon cell line than for the genotype 1a replicon cell line. However, the two cell lines each contain a different genotype replicon and are two independent cell clones; the experiments were not performed side by side; and the cell lines were not equally passaged and the replicon RNA population (quasispecies) diversity could be higher in replicon cells that have been grown for hundred of passages (replicon 1b).

[0231] Following selection of VX-222 resistant colonies, many independent resistant clones were randomly picked for each replicon cell line, and their progeny HCV RNA was analyzed genotypically by sequencing the C-terminal two-thirds of the NS5B gene. Amino acids residues M423, I482, and A486 were consistently found to mutate in both genotypes. All selected clones contained a mutation at position L419, M423, I482, or A486, except for one HCV variant having only a mutation at position A494. There was no apparent relationship between the drug concentration used and the mutation profile of these clones. For instance, in genotype 1b, M419, L482, and A486 mutations were randomly spread over the entire range of VX-222 concentrations, despite the fact that the mutations confer different degrees of resistance to VX-222 (see Table 2 below). Additionally, the resistance profile between the genotypes appears to differ; M423 and L482 were the most prevalent mutations in genotype 1a (63% of the 36 clones) while L419 and A486 were the most prevalent mutations in genotype 1b (74% of the 31 clones). The difference in resistance pattern could be due to the difference in the initial progeny diversity between genotypes.

TABLE 2
SENSITIVITY OF HCV REPLICON VARIANTS TO VX-222

| Replicon | IC₅₀ | IC₅₀ Fold-Change vs |
|---|---|---|
| (genotype) | (nM) | Wild-Type Replicon |
| L419M | 900 | ≈80 |
| L419S | >2,000 | >66 |
| M423T | 319 | ≈29 |
| M423V | 110 | ≈10 |
| M423I | 77.2 | ≈7.1 |
| I482L | 290 | ≈26 |
| A486V | 843 | ≈50 |
| V494A | 132 | ≈5.9 |

[0232] The role of amino acids L419, M423, I482, A486, and V494A in conferring resistance to VX-222 was investigated. A total of seven recombinant replicons with single mutations—L419M, M423V, M423T, M423I, I482L A486V, and V494A—were generated and stable replicon cell lines were obtained for each mutation. In addition, an original resistant colony with L419S genotype was employed to determine the susceptibility to VX-222. The stability of the mutations in the replicon cell lines was confirmed prior to their use by direct sequencing of the RT-PCR products using RNA extracted from these cell lines.

[0233] The activity of VX-222 against the wild-type replicon cells was compared to the recombinant mutant replicons (Table 2). An approximate 6- to 80-fold increase of VX-222's IC50 was recorded for all seven recombinant replicons, confirming the mutations' roles in VX-222 resistance. The M423V and M423I mutations were shown to confer about the same level of resistance to VX-222, 10 and 7.1-fold increase in IC50, respectively. The L419M, M423T, and A486V mutations conferred a higher level of resistance to VX-222 with 80, 29, and 50-fold increase of IC50, respectively. A greater than 66-fold increase in VX-222's IC50 was recorded with the L419S cell line.

[0234] This example describes the production of recombinant HCV NSSB polymerase and identification of mutations within the polymerase amino acid sequence conferring resistance to a polymerase inhibitor (VX-222). The assays described herein can be repeated with test agents (in addition to VX-222 or as a replacement for VX-222) to identify new agents that are effective (alone or in combination with VX-222) for inhibiting replication of HCV, including mutant HCV, such as the mutant HCV described herein.

[0235] All publications, patents and patent applications cited in this specification are herein incorporated by reference as if each individual publication or patent application were specifically and individually indicated to be incorporated by reference. Although the foregoing invention has been described in some detail by way of illustration and example for purposes of clarity of understanding, it will be readily apparent to those of ordinary skill in the art in light of the teachings of this invention that certain changes and modifications may be made thereto without departing from the spirit or scope of the appended claims.

The application's sequence listing, which the Patent Office published only in electronic form, follows.

SEQUENCE LISTING (516 sequences)

SEQ ID NO: 1 - protein, 591 aa, Hepatitis C virus
SMSYTWTGALITPCAAEETKLPINALSNSLLRHHNLVYATTSRSASLRQKKVTFDRLQVLDDHYRDVLKEMKAKASTVKAKLLSVEEACKLTPPHSARSKFGYGAKDVRNLSSKAVNHIRSVWKDLLEDTETPIDTTIMAKNEVFCVQPEKGGRKPARLIVFPDLGVRVCEKMALYDVVSTLPQAVMGSSYGFQYSPGQRVEFLVNAWKAKKCPMGFAYDTRCFDSTVTENDIRVEESIYQCCDLAPEARQAIRSLTERLYIGGPLTNSKGQNCGYRRCRASGVLTTSCGNTLTCYLKAAAACRAAKLQDCTMLVCGDDLVVICESAGTQEDEASLRAFTEAMTRYSAPPGDPPKPEYDLELITSCSSNVSVAHDASGKRVYYLTRDPTTPLARAAWETARHTPVNSWLGNIIMYAPTLWARMILMTHFFSILLAQEQLEKTLDCQIYGACYSIEPLDLPQIIQRLHGLSAFSLHSYSPGEINRVASCLRKLGVPPLRVWRHRARSVRARLLSQGGRAATCGKYLFNWAVRTKLKLTPIPAASQLDLSSWFVAGYSGGDIYHSLSRARPRWFMWCLLLLSVGVGIYLLPNR

SEQ ID NO: 2 - DNA, 1773 bp, Hepatitis C virus
tcgatgtcctacacatggacaggcgccctgatcacgccatgcgctgcggaggaaaccaagctgcccatcaatgcactgagcaactctttgctccgtcaccacaacttggtctatgctacaacatctcgcagcgcaagcctgcggcagaagaaggtcacctttgacagactgcaggtcctggacgaccactaccgggacgtgctcaaggagatgaaggcgaaggcgtccacagttaaggctaaacttctatccgtggaggaagcctgtaagctgacgcccccacattcggccagatctaaatttggctatggggcaaaggacgtccggaacctatccagcaaggccgttaaccacatccgctccgtgtggaaggacttgctggaagacactgagacaccaattgacaccaccatcatggcaaaaaatgaggttttctgcgtccaaccagagaaggggggccgcaagccagctcgccttatcgtattcccagatttgggggttcgtgtgtgcgagaaaatggccctttacgatgtggtctccaccctccctcaggccgtgatgggctcttcatacggattccaatactctcctggacagcgggtcgagttcctggtgaatgcctggaaagcgaagaaatgccctatgggcttcgcatatgacacccgctgttttgactcaacggtcactgagaatgacatccgtgttgaggagtcaatctaccaatgttgtgacttggcccccgaagccagacaggccataaggtcgctcacagagcggctttacatcgggggccccctgactaattctaaagggcagaactgcggctatcgccggtgccgcgcgagcggtgtactgacgaccagctgcggtaataccctcacatgttacttgaaggccgctgcggcctgtcgagctgcgaagctccaggactgcacgatgctcgtatgcggagacgaccttgtcgttatctgtgaaagcgcggggacccaagaggacgaggcgagcctacgggccttcacggaggctatgactagatactctgccccccctggggacccgcccaaaccagaatacgacttggagttgataacatcatgctcctccaatgtgtcagtcgcgcacgatgcatctggcaaaagggtgtactatctcacccgtgaccccaccaccccccttgcgcgggctgcgtgggagacagctagacacactccagtcaattcctggctaggcaacatcatcatgtatgcgcccaccttgtgggcaaggatgatcctgatgactcatttcttctccatccttctagctcaggaacaacttgaaaaaaccctagattgtcagatctacggggcctgttactccattgagccacttgacctacctcagatcattcaacgactccatggccttagcgcattttcactccatagttactctccaggtgagatcaatagggtggcttcatgcctcaggaaacttggggtaccgcccttgcgagtctggagacatcgggccagaagtgtccgcgctaggctactgtcccagggggggagggctgccacttgtggcaagtacctcttcaactgggcagtaaggaccaagctcaaactcactccaatcccggctgcgtcccagttggatttatccagctggttcgttgctggttacagcgggggagacatatatcacagcctgtctcgtgcccgaccccgctggttcatgtggtgcctactcctactttctgtaggggtaggcatctatctactccccaaccga

SEQ ID NO: 3 - protein, 591 aa, Hepatitis C virus
  MOD_RES (419)..(419): Xaa is Leu, Ile, Val, or Pro
  MOD_RES (423)..(423): Xaa is Met, or Ala
  MOD_RES (482)..(482): Xaa is Ile, Ala, Thr, Val, or Asp
  MOD_RES (486)..(486): Xaa is Ala, Val, Ile, Thr, or Ser
  MOD_RES (494)..(494): Xaa is Val, or Ile
SMSYTWTGALITPCAAEETKLPINALSNSLLRHHNLVYATTSRSASLRQKKVTFDRLQVLDDHYRDVLKEMKAKASTVKAKLLSVEEACKLTPPHSARSKFGYGAKDVRNLSSKAVNHIRSVWKDLLEDTETPIDTTIMAKNEVFCVQPEKGGRKPARLIVFPDLGVRVCEKMALYDVVSTLPQAVMGSSYGFQYSPGQRVEFLVNAWKAKKCPMGFAYDTRCFDSTVTENDIRVEESIYQCCDLAPEARQAIRSLTERLYIGGPLTNSKGQNCGYRRCRASGVLTTSCGNTLTCYLKAAAACRAAKLQDCTMLVCGDDLVVICESAGTQEDEASLRAFTEAMTRYSAPPGDPPKPEYDLELITSCSSNVSVAHDASGKRVYYLTRDPTTPLARAAWETARHTPVNSWLGNIIMYAPTXWARXILMTHFFSILLAQEQLEKTLDCQIYGACYSIEPLDLPQIIQRLHGLSAFSLHSYSPGEXNRVXSCLRKLGXPPLRVWRHRARSVRARLLSQGGRAATCGKYLFNWAVRTKLKLTPIPAASQLDLSSWFVAGYSGGDIYHSLSRARPRWFMWCLLLLSVGVGIYLLPNR

SEQ ID NO: 4 - protein, 591 aa, Artificial Sequence
  Synthetic peptide
SMSYTWTGALITPCAAEETKLPINALSNSLLRHHNLVYATTSRSASLRQKKVTFDRLQVLDDHYRDVLKEMKAKASTVKAKLLSVEEACKLTPPHSARSKFGYGAKDVRNLSSKAVNHIRSVWKDLLEDTETPIDTTIMAKNEVFCVQPEKGGRKPARLIVFPDLGVRVCEKMALYDVVSTLPQAVMGSSYGFQYSPGQRVEFLVNAWKAKKCPMGFAYDTRCFDSTVTENDIRVEESIYQCCDLAPEARQAIRSLTERLYIGGPLTNSKGQNCGYRRCRASGVLTTSCGNTLTCYLKAAAACRAAKLQDCTMLVCGDDLVVICESAGTQEDEASLRAFTEAMTRYSAPPGDPPKPEYDLELITSCSSNVSVAHDASGKRVYYLTRDPTTPLARAAWETARHTPVNSWLGNIIMYAPTLWARMILMTHFFSILLAQEQLEKTLDCQIYGACYSIEPLDLPQIIQRLHGLSAFSLHSYSPGEINRVVSCLRKLGVPPLRVWRHRARSVRARLLSQGGRAATCGKYLFNWAVRTKLKLTPIPAASQLDLSSWFVAGYSGGDIYHSLSRARPRWFMWCLLLLSVGVGIYLLPNR

SEQ ID NO: 5 - protein, 591 aa, Artificial Sequence
  Synthetic peptide
SMSYTWTGALITPCAAEETKLPINALSNSLLRHHNLVYATTSRSASLRQKKVTFDRLQVLDDHYRDVLKEMKAKASTVKAKLLSVEEACKLTPPHSARSKFGYGAKDVRNLSSKAVNHIRSVWKDLLEDTETPIDTTIMAKNEVFCVQPEKGGRKPARLIVFPDLGVRVCEKMALYDVVSTLPQAVMGSSYGFQYSPGQRVEFLVNAWKAKKCPMGFAYDTRCFDSTVTENDIRVEESIYQCCDLAPEARQAIRSLTERLYIGGPLTNSKGQNCGYRRCRASGVLTTSCGNTLTCYLKAAAACRAAKLQDCTMLVCGDDLVVICESAGTQEDEASLRAFTEAMTRYSAPPGDPPKPEYDLELITSCSSNVSVAHDASGKRVYYLTRDPTTPLARAAWETARHTPVNSWLGNIIMYAPTLWARMILMTHFFSILLAQEQLEKTLDCQIYGACYSIEPLDLPQIIQRLHGLSAFSLHSYSPGEINRVISCLRKLGVPPLRVWRHRARSVRARLLSQGGRAATCGKYLFNWAVRTKLKLTPIPAASQLDLSSWFVAGYSGGDIYHSLSRARPRWFMWCLLLLSVGVGIYLLPNR

SEQ ID NO: 6 - protein, 591 aa, Artificial Sequence
  Synthetic peptide
SMSYTWTGALITPCAAEETKLPINALSNSLLRHHNLVYATTSRSASLRQKKVTFDRLQVLDDHYRDVLKEMKAKASTVKAKLLSVEEACKLTPPHSARSKFGYGAKDVRNLSSKAVNHIRSVWKDLLEDTETPIDTTIMAKNEVFCVQPEKGGRKPARLIVFPDLGVRVCEKMALYDVVSTLPQAVMGSSYGFQYSPGQRVEFLVNAWKAKKCPMGFAYDTRCFDSTVTENDIRVEESIYQCCDLAPEARQAIRSLTERLYIGGPLTNSKGQNCGYRRCRASGVLTTSCGNTLTCYLKAAAACRAAKLQDCTMLVCGDDLVVICESAGTQEDEASLRAFTEAMTRYSAPPGDPPKPEYDLELITSCSSNVSVAHDASGKRVYYLTRDPTTPLARAAWETARHTPVNSWLGNIIMYAPTLWARMILMTHFFSILLAQEQLEKTLDCQIYGACYSIEPLDLPQIIQRLHGLSAFSLHSYSPGEINRVTSCLRKLGVPPLRVWRHRARSVRARLLSQGGRAATCGKYLFNWAVRTKLKLTPIPAASQLDLSSWFVAGYSGGDIYHSLSRARPRWFMWCLLLLSVGVGIYLLPNR

SEQ ID NO: 7 - protein, 591 aa, Artificial Sequence
  Synthetic peptide
SMSYTWTGALITPCAAEETKLPINALSNSLLRHHNLVYATTSRSASLRQKKVTFDRLQVLDDHYRDVLKEMKAKASTVKAKLLSVEEACKLTPPHSARSKFGYGAKDVRNLSSKAVNHIRSVWKDLLEDTETPIDTTIMAKNEVFCVQPEKGGRKPARLIVFPDLGVRVCEKMALYDVVSTLPQAVMGSSYGFQYSPGQRVEFLVNAWKAKKCPMGFAYDTRCFDSTVTENDIRVEESIYQCCDLAPEARQAIRSLTERLYIGGPLTNSKGQNCGYRRCRASGVLTTSCGNTLTCYLKAAAACRAAKLQDCTMLVCGDDLVVICESAGTQEDEASLRAFTEAMTRYSAPPGDPPKPEYDLELITSCSSNVSVAHDASGKRVYYLTRDPTTPLARAAWETARHTPVNSWLGNIIMYAPTLWARMILMTHFFSILLAQEQLEKTLDCQIYGACYSIEPLDLPQIIQRLHGLSAFSLHSYSPGEINRVSSCLRKLGVPPLRVWRHRARSVRARLLSQGGRAATCGKYLFNWAVRTKLKLTPIPAASQLDLSSWFVAGYSGGDIYHSLSRARPRWFMWCLLLLSVGVGIYLLPNR

SEQ ID NO: 8 - protein, 591 aa, Artificial Sequence
  Synthetic peptide
SMSYTWTGALITPCAAEETKLPINALSNSLLRHHNLVYATTSRSASLRQKKVTFDRLQVLDDHYRDVLKEMKAKASTVKAKLLSVEEACKLTPPHSARSKFGYGAKDVRNLSSKAVNHIRSVWKDLLEDTETPIDTTIMAKNEVFCVQPEKGGRKPARLIVFPDLGVRVCEKMALYDVVSTLPQAVMGSSYGFQYSPGQRVEFLVNAWKAKKCPMGFAYDTRCFDSTVTENDIRVEESIYQCCDLAPEARQAIRSLTERLYIGGPLTNSKGQNCGYRRCRASGVLTTSCGNTLTCYLKAAAACRAAKLQDCTMLVCGDDLVVICESAGTQEDEASLRAFTEAMTRYSAPPGDPPKPEYDLELITSCSSNVSVAHDASGKRVYYLTRDPTTPLARAAWETARHTPVNSWLGNIIMYAPTLWARMILMTHFFSILLAQEQLEKTLDCQIYGACYSIEPLDLPQIIQRLHGLSAFSLHSYSPGEINRVASCLRKLGIPPLRVWRHRARSVRARLLSQGGRAATCGKYLFNWAVRTKLKLTPIPAASQLDLSSWFVAGYSGGDIYHSLSRARPRWFMWCLLLLSVGVGIYLLPNR

SEQ ID NO: 9 - protein, 591 aa, Artificial Sequence
  Synthetic peptide
SMSYTWTGALITPCAAEETKLPINALSNSLLRHHNLVYATTSRSASLRQKKVTFDRLQVLDDHYRDVLKEMKAKASTVKAKLLSVEEACKLTPPHSARSKFGYGAKDVRNLSSKAVNHIRSVWKDLLEDTETPIDTTIMAKNEVFCVQPEKGGRKPARLIVFPDLGVRVCEKMALYDVVSTLPQAVMGSSYGFQYSPGQRVEFLVNAWKAKKCPMGFAYDTRCFDSTVTENDIRVEESIYQCCDLAPEARQAIRSLTERLYIGGPLTNSKGQNCGYRRCRASGVLTTSCGNTLTCYLKAAAACRAAKLQDCTMLVCGDDLVVICESAGTQEDEASLRAFTEAMTRYSAPPGDPPKPEYDLELITSCSSNVSVAHDASGKRVYYLTRDPTTPLARAAWETARHTPVNSWLGNIIMYAPTLWARMILMTHFFSILLAQEQLEKTLDCQIYGACYSIEPLDLPQIIQRLHGLSAFSLHSYSPGEINRVVSCLRKLGIPPLRVWRHRARSVRARLLSQGGRAATCGKYLFNWAVRTKLKLTPIPAASQLDLSSWFVAGYSGGDIYHSLSRARPRWFMWCLLLLSVGVGIYLLPNR

SEQ ID NO: 10 - protein, 591 aa, Artificial Sequence
  Synthetic peptide
SMSYTWTGALITPCAAEETKLPINALSNSLLRHHNLVYATTSRSASLRQKKVTFDRLQVLDDHYRDVLKEMKAKASTVKAKLLSVEEACKLTPPHSARSKFGYGAKDVRNLSSKAVNHIRSVWKDLLEDTETPIDTTIMAKNEVFCVQPEKGGRKPARLIVFPDLGVRVCEKMALYDVVSTLPQAVMGSSYGFQYSPGQRVEFLVNAWKAKKCPMGFAYDTRCFDSTVTENDIRVEESIYQCCDLAPEARQAIRSLTERLYIGGPLTNSKGQNCGYRRCRASGVLTTSCGNTLTCYLKAAAACRAAKLQDCTMLVCGDDLVVICESAGTQEDEASLRAFTEAMTRYSAPPGDPPKPEYDLELITSCSSNVSVAHDASGKRVYYLTRDPTTPLARAAWETARHTPVNSWLGNIIMYAPTLWARMILMTHFFSILLAQEQLEKTLDCQIYGACYSIEPLDLPQIIQRLHGLSAFSLHSYSPGEINRVISCLRKLGIPPLRVWRHRARSVRARLLSQGGRAATCGKYLFNWAVRTKLKLTPIPAASQLDLSSWFVAGYSGGDIYHSLSRARPRWFMWCLLLLSVGVGIYLLPNR

SEQ ID NO: 11 - protein, 591 aa, Artificial Sequence
  Synthetic peptide
SMSYTWTGALITPCAAEETKLPINALSNSLLRHHNLVYATTSRSASLRQKKVTFDRLQVLDDHYRDVLKEMKAKASTVKAKLLSVEEACKLTPPHSARSKFGYGAKDVRNLSSKAVNHIRSVWKDLLEDTETPIDTTIMAKNEVFCVQPEKGGRKPARLIVFPDLGVRVCEKMALYDVVSTLPQAVMGSSYGFQYSPGQRVEFLVNAWKAKKCPMGFAYDTRCFDSTVTENDIRVEESIYQCCDLAPEARQAIRSLTERLYIGGPLTNSKGQNCGYRRCRASGVLTTSCGNTLTCYLKAAAACRAAKLQDCTMLVCGDDLVVICESAGTQEDEASLRAFTEAMTRYSAPPGDPPKPEYDLELITSCSSNVSVAHDASGKRVYYLTRDPTTPLARAAWETARHTPVNSWLGNIIMYAPTLWARMILMTHFFSILLAQEQLEKTLDCQIYGACYSIEPLDLPQIIQRLHGLSAFSLHSYSPGEINRVTSCLRKLGIPPLRVWRHRARSVRARLLSQGGRAATCGKYLFNWAVRTKLKLTPIPAASQLDLSSWFVAGYSGGDIYHSLSRARPRWFMWCLLLLSVGVGIYLLPNR

SEQ ID NO: 12 - protein, 591 aa, Artificial Sequence
  Synthetic peptide
SMSYTWTGALITPCAAEETKLPINALSNSLLRHHNLVYATTSRSASLRQKKVTFDRLQVLDDHYRDVLKEMKAKASTVKAKLLSVEEACKLTPPHSARSKFGYGAKDVRNLSSKAVNHIRSVWKDLLEDTETPIDTTIMAKNEVFCVQPEKGGRKPARLIVFPDLGVRVCEKMALYDVVSTLPQAVMGSSYGFQYSPGQRVEFLVNAWKAKKCPMGFAYDTRCFDSTVTENDIRVEESIYQCCDLAPEARQAIRSLTERLYIGGPLTNSKGQNCGYRRCRASGVLTTSCGNTLTCYLKAAAACRAAKLQDCTMLVCGDDLVVICESAGTQEDEASLRAFTEAMTRYSAPPGDPPKPEYDLELITSCSSNVSVAHDASGKRVYYLTRDPTTPLARAAWETARHTPVNSWLGNIIMYAPTLWARMILMTHFFSILLAQEQLEKTLDCQIYGACYSIEPLDLPQIIQRLHGLSAFSLHSYSPGEINRVSSCLRKLGIPPLRVWRHRARSVRARLLSQGGRAATCGKYLFNWAVRTKLKLTPIPAASQLDLSSWFVAGYSGGDIYHSLSRARPRWFMWCLLLLSVGVGIYLLPNR

SEQ ID NO: 13 - protein, 591 aa, Artificial Sequence
  Synthetic peptide
SMSYTWTGALITPCAAEETKLPINALSNSLLRHHNLVYATTSRSASLRQKKVTFDRLQVLDDHYRDVLKEMKAKASTVKAKLLSVEEACKLTPPHSARSKFGYGAKDVRNLSSKAVNHIRSVWKDLLEDTETPIDTTIMAKNEVFCVQPEKGGRKPARLIVFPDLGVRVCEKMALYDVVSTLPQAVMGSSYGFQYSPGQRVEFLVNAWKAKKCPMGFAYDTRCFDSTVTENDIRVEESIYQCCDLAPEARQAIRSLTERLYIGGPLTNSKGQNCGYRRCRASGVLTTSCGNTLTCYLKAAAACRAAKLQDCTMLVCGDDLVVICESAGTQEDEASLRAFTEAMTRYSAPPGDPPKPEYDLELITSCSSNVSVAHDASGKRVYYLTRDPTTPLARAAWETARHTPVNSWLGNIIMYAPTLWARAILMTHFFSILLAQEQLEKTLDCQIYGACYSIEPLDLPQIIQRLHGLSAFSLHSYSPGEINRVASCLRKLGVPPLRVWRHRARSVRARLLSQGGRAATCGKYLFNWAVRTKLKLTPIPAASQLDLSSWFVAGYSGGDIYHSLSRARPRWFMWCLLLLSVGVGIYLLPNR

SEQ ID NO: 14 - protein, 591 aa, Artificial Sequence
  Synthetic peptide
SMSYTWTGALITPCAAEETKLPINALSNSLLRHHNLVYATTSRSASLRQKKVTFDRLQVLDDHYRDVLKEMKAKASTVKAKLLSVEEACKLTPPHSARSKFGYGAKDVRNLSSKAVNHIRSVWKDLLEDTETPIDTTIMAKNEVFCVQPEKGGRKPARLIVFPDLGVRVCEKMALYDVVSTLPQAVMGSSYGFQYSPGQRVEFLVNAWKAKKCPMGFAYDTRCFDSTVTENDIRVEESIYQCCDLAPEARQAIRSLTERLYIGGPLTNSKGQNCGYRRCRASGVLTTSCGNTLTCYLKAAAACRAAKLQDCTMLVCGDDLVVICESAGTQEDEASLRAFTEAMTRYSAPPGDPPKPEYDLELITSCSSNVSVAHDASGKRVYYLTRDPTTPLARAAWETARHTPVNSWLGNIIMYAPTLWARAILMTHFFSILLAQEQLEKTLDCQIYGACYSIEPLDLPQIIQRLHGLSAFSLHSYSPGEINRVVSCLRKLGVPPLRVWRHRARSVRARLLSQGGRAATCGKYLFNWAVRTKLKLTPIPAASQLDLSSWFVAGYSGGDIYHSLSRARPRWFMWCLLLLSVGVGIYLLPNR

SEQ ID NO: 15 - protein, 591 aa, Artificial Sequence
  Sythetic peptide
SMSYTWTGALITPCAAEETKLPINALSNSLLRHHNLVYATTSRSASLRQKKVTFDRLQVLDDHYRDVLKEMKAKASTVKAKLLSVEEACKLTPPHSARSKFGYGAKDVRNLSSKAVNHIRSVWKDLLEDTETPIDTTIMAKNEVFCVQPEKGGRKPARLIVFPDLGVRVCEKMALYDVVSTLPQAVMGSSYGFQYSPGQRVEFLVNAWKAKKCPMGFAYDTRCFDSTVTENDIRVEESIYQCCDLAPEARQAIRSLTERLYIGGPLTNSKGQNCGYRRCRASGVLTTSCGNTLTCYLKAAAACRAAKLQDCTMLVCGDDLVVICESAGTQEDEASLRAFTEAMTRYSAPPGDPPKPEYDLELITSCSSNVSVAHDASGKRVYYLTRDPTTPLARAAWETARHTPVNSWLGNIIMYAPTLWARAILMTHFFSILLAQEQLEKTLDCQIYGACYSIEPLDLPQIIQRLHGLSAFSLHSYSPGEINRVISCLRKLGVPPLRVWRHRARSVRARLLSQGGRAATCGKYLFNWAVRTKLKLTPIPAASQLDLSSWFVAGYSGGDIYHSLSRARPRWFMWCLLLLSVGVGIYLLPNR

SEQ ID NO: 16 - protein, 591 aa, Artificial Sequence
  Synthetic peptide
SMSYTWTGALITPCAAEETKLPINALSNSLLRHHNLVYATTSRSASLRQKKVTFDRLQVLDDHYRDVLKEMKAKASTVKAKLLSVEEACKLTPPHSARSKFGYGAKDVRNLSSKAVNHIRSVWKDLLEDTETPIDTTIMAKNEVFCVQPEKGGRKPARLIVFPDLGVRVCEKMALYDVVSTLPQAVMGSSYGFQYSPGQRVEFLVNAWKAKKCPMGFAYDTRCFDSTVTENDIRVEESIYQCCDLAPEARQAIRSLTERLYIGGPLTNSKGQNCGYRRCRASGVLTTSCGNTLTCYLKAAAACRAAKLQDCTMLVCGDDLVVICESAGTQEDEASLRAFTEAMTRYSAPPGDPPKPEYDLELITSCSSNVSVAHDASGKRVYYLTRDPTTPLARAAWETARHTPVNSWLGNIIMYAPTLWARAILMTHFFSILLAQEQLEKTLDCQIYGACYSIEPLDLPQIIQRLHGLSAFSLHSYSPGEINRVTSCLRKLGVPPLRVWRHRARSVRARLLSQGGRAATCGKYLFNWAVRTKLKLTPIPAASQLDLSSWFVAGYSGGDIYHSLSRARPRWFMWCLLLLSVGVGIYLLPNR

SEQ ID NO: 17 - protein, 591 aa, Artificial Sequence
  Synthetic peptide
SMSYTWTGALITPCAAEETKLPINALSNSLLRHHNLVYATTSRSASLRQKKVTFDRLQVLDDHYRDVLKEMKAKASTVKAKLLSVEEACKLTPPHSARSKFGYGAKDVRNLSSKAVNHIRSVWKDLLEDTETPIDTTIMAKNEVFCVQPEKGGRKPARLIVFPDLGVRVCEKMALYDVVSTLPQAVMGSSYGFQYSPGQRVEFLVNAWKAKKCPMGFAYDTRCFDSTVTENDIRVEESIYQCCDLAPEARQAIRSLTERLYIGGPLTNSKGQNCGYRRCRASGVLTTSCGNTLTCYLKAAAACRAAKLQDCTMLVCGDDLVVICESAGTQEDEASLRAFTEAMTRYSAPPGDPPKPEYDLELITSCSSNVSVAHDASGKRVYYLTRDPTTPLARAAWETARHTPVNSWLGNIIMYAPTLWARAILMTHFFSILLAQEQLEKTLDCQIYGACYSIEPLDLPQIIQRLHGLSAFSLHSYSPGEINRVSSCLRKLGVPPLRVWRHRARSVRARLLSQGGRAATCGKYLFNWAVRTKLKLTPIPAASQLDLSSWFVAGYSGGDIYHSLSRARPRWFMWCLLLLSVGVGIYLLPNR

SEQ ID NO: 18 - protein, 591 aa, Artificial Sequence
  Synthetic peptid
SMSYTWTGALITPCAAEETKLPINALSNSLLRHHNLVYATTSRSASLRQKKVTFDRLQVLDDHYRDVLKEMKAKASTVKAKLLSVEEACKLTPPHSARSKFGYGAKDVRNLSSKAVNHIRSVWKDLLEDTETPIDTTIMAKNEVFCVQPEKGGRKPARLIVFPDLGVRVCEKMALYDVVSTLPQAVMGSSYGFQYSPGQRVEFLVNAWKAKKCPMGFAYDTRCFDSTVTENDIRVEESIYQCCDLAPEARQAIRSLTERLYIGGPLTNSKGQNCGYRRCRASGVLTTSCGNTLTCYLKAAAACRAAKLQDCTMLVCGDDLVVICESAGTQEDEASLRAFTEAMTRYSAPPGDPPKPEYDLELITSCSSNVSVAHDASGKRVYYLTRDPTTPLARAAWETARHTPVNSWLGNIIMYAPTLWARAILMTHFFSILLAQEQLEKTLDCQIYGACYSIEPLDLPQIIQRLHGLSAFSLHSYSPGEINRVASCLRKLGIPPLRVWRHRARSVRARLLSQGGRAATCGKYLFNWAVRTKLKLTPIPAASQLDLSSWFVAGYSGGDIYHSLSRARPRWFMWCLLLLSVGVGIYLLPNR

SEQ ID NO: 19 - protein, 591 aa, Artificial Sequence
  Synthetic peptide
SMSYTWTGALITPCAAEETKLPINALSNSLLRHHNLVYATTSRSASLRQKKVTFDRLQVLDDHYRDVLKEMKAKASTVKAKLLSVEEACKLTPPHSARSKFGYGAKDVRNLSSKAVNHIRSVWKDLLEDTETPIDTTIMAKNEVFCVQPEKGGRKPARLIVFPDLGVRVCEKMALYDVVSTLPQAVMGSSYGFQYSPGQRVEFLVNAWKAKKCPMGFAYDTRCFDSTVTENDIRVEESIYQCCDLAPEARQAIRSLTERLYIGGPLTNSKGQNCGYRRCRASGVLTTSCGNTLTCYLKAAAACRAAKLQDCTMLVCGDDLVVICESAGTQEDEASLRAFTEAMTRYSAPPGDPPKPEYDLELITSCSSNVSVAHDASGKRVYYLTRDPTTPLARAAWETARHTPVNSWLGNIIMYAPTLWARAILMTHFFSILLAQEQLEKTLDCQIYGACYSIEPLDLPQIIQRLHGLSAFSLHSYSPGEINRVVSCLRKLGIPPLRVWRHRARSVRARLLSQGGRAATCGKYLFNWAVRTKLKLTPIPAASQLDLSSWFVAGYSGGDIYHSLSRARPRWFMWCLLLLSVGVGIYLLPNR

SEQ ID NO: 20 - protein, 591 aa, Artificial Sequence
  Synthetic peptide
SMSYTWTGALITPCAAEETKLPINALSNSLLRHHNLVYATTSRSASLRQKKVTFDRLQVLDDHYRDVLKEMKAKASTVKAKLLSVEEACKLTPPHSARSKFGYGAKDVRNLSSKAVNHIRSVWKDLLEDTETPIDTTIMAKNEVFCVQPEKGGRKPARLIVFPDLGVRVCEKMALYDVVSTLPQAVMGSSYGFQYSPGQRVEFLVNAWKAKKCPMGFAYDTRCFDSTVTENDIRVEESIYQCCDLAPEARQAIRSLTERLYIGGPLTNSKGQNCGYRRCRASGVLTTSCGNTLTCYLKAAAACRAAKLQDCTMLVCGDDLVVICESAGTQEDEASLRAFTEAMTRYSAPPGDPPKPEYDLELITSCSSNVSVAHDASGKRVYYLTRDPTTPLARAAWETARHTPVNSWLGNIIMYAPTLWARAILMTHFFSILLAQEQLEKTLDCQIYGACYSIEPLDLPQIIQRLHGLSAFSLHSYSPGEINRVISCLRKLGIPPLRVWRHRARSVRARLLSQGGRAATCGKYLFNWAVRTKLKLTPIPAASQLDLSSWFVAGYSGGDIYHSLSRARPRWFMWCLLLLSVGVGIYLLPNR

SEQ ID NO: 21 - protein, 591 aa, Artificial Sequence
  Synthetic peptide
SMSYTWTGALITPCAAEETKLPINALSNSLLRHHNLVYATTSRSASLRQKKVTFDRLQVLDDHYRDVLKEMKAKASTVKAKLLSVEEACKLTPPHSARSKFGYGAKDVRNLSSKAVNHIRSVWKDLLEDTETPIDTTIMAKNEVFCVQPEKGGRKPARLIVFPDLGVRVCEKMALYDVVSTLPQAVMGSSYGFQYSPGQRVEFLVNAWKAKKCPMGFAYDTRCFDSTVTENDIRVEESIYQCCDLAPEARQAIRSLTERLYIGGPLTNSKGQNCGYRRCRASGVLTTSCGNTLTCYLKAAAACRAAKLQDCTMLVCGDDLVVICESAGTQEDEASLRAFTEAMTRYSAPPGDPPKPEYDLELITSCSSNVSVAHDASGKRVYYLTRDPTTPLARAAWETARHTPVNSWLGNIIMYAPTLWARAILMTHFFSILLAQEQLEKTLDCQIYGACYSIEPLDLPQIIQRLHGLSAFSLHSYSPGEINRVTSCLRKLGIPPLRVWRHRARSVRARLLSQGGRAATCGKYLFNWAVRTKLKLTPIPAASQLDLSSWFVAGYSGGDIYHSLSRARPRWFMWCLLLLSVGVGIYLLPNR

SEQ ID NO: 22 - protein, 591 aa, Artificial Sequence
  Synthetic peptide
SMSYTWTGALITPCAAEETKLPINALSNSLLRHHNLVYATTSRSASLRQKKVTFDRLQVLDDHYRDVLKEMKAKASTVKAKLLSVEEACKLTPPHSARSKFGYGAKDVRNLSSKAVNHIRSVWKDLLEDTETPIDTTIMAKNEVFCVQPEKGGRKPARLIVFPDLGVRVCEKMALYDVVSTLPQAVMGSSYGFQYSPGQRVEFLVNAWKAKKCPMGFAYDTRCFDSTVTENDIRVEESIYQCCDLAPEARQAIRSLTERLYIGGPLTNSKGQNCGYRRCRASGVLTTSCGNTLTCYLKAAAACRAAKLQDCTMLVCGDDLVVICESAGTQEDEASLRAFTEAMTRYSAPPGDPPKPEYDLELITSCSSNVSVAHDASGKRVYYLTRDPTTPLARAAWETARHTPVNSWLGNIIMYAPTLWARAILMTHFFSILLAQEQLEKTLDCQIYGACYSIEPLDLPQIIQRLHGLSAFSLHSYSPGEINRVSSCLRKLGIPPLRVWRHRARSVRARLLSQGGRAATCGKYLFNWAVRTKLKLTPIPAASQLDLSSWFVAGYSGGDIYHSLSRARPRWFMWCLLLLSVGVGIYLLPNR

SEQ ID NO: 23 - protein, 591 aa, Artificial Sequence
  Synthetic peptide
SMSYTWTGALITPCAAEETKLPINALSNSLLRHHNLVYATTSRSASLRQKKVTFDRLQVLDDHYRDVLKEMKAKASTVKAKLLSVEEACKLTPPHSARSKFGYGAKDVRNLSSKAVNHIRSVWKDLLEDTETPIDTTIMAKNEVFCVQPEKGGRKPARLIVFPDLGVRVCEKMALYDVVSTLPQAVMGSSYGFQYSPGQRVEFLVNAWKAKKCPMGFAYDTRCFDSTVTENDIRVEESIYQCCDLAPEARQAIRSLTERLYIGGPLTNSKGQNCGYRRCRASGVLTTSCGNTLTCYLKAAAACRAAKLQDCTMLVCGDDLVVICESAGTQEDEASLRAFTEAMTRYSAPPGDPPKPEYDLELITSCSSNVSVAHDASGKRVYYLTRDPTTPLARAAWETARHTPVNSWLGNIIMYAPTLWARMILMTHFFSILLAQEQLEKTLDCQIYGACYSIEPLDLPQIIQRLHGLSAFSLHSYSPGEANRVASCLRKLGVPPLRVWRHRARSVRARLLSQGGRAATCGKYLFNWAVRTKLKLTPIPAASQLDLSSWFVAGYSGGDIYHSLSRARPRWFMWCLLLLSVGVGIYLLPNR

SEQ ID NO: 24 - protein, 591 aa, Artificial Sequence
  Synthetic peptide
SMSYTWTGALITPCAAEETKLPINALSNSLLRHHNLVYATTSRSASLRQKKVTFDRLQVLDDHYRDVLKEMKAKASTVKAKLLSVEEACKLTPPHSARSKFGYGAKDVRNLSSKAVNHIRSVWKDLLEDTETPIDTTIMAKNEVFCVQPEKGGRKPARLIVFPDLGVRVCEKMALYDVVSTLPQAVMGSSYGFQYSPGQRVEFLVNAWKAKKCPMGFAYDTRCFDSTVTENDIRVEESIYQCCDLAPEARQAIRSLTERLYIGGPLTNSKGQNCGYRRCRASGVLTTSCGNTLTCYLKAAAACRAAKLQDCTMLVCGDDLVVICESAGTQEDEASLRAFTEAMTRYSAPPGDPPKPEYDLELITSCSSNVSVAHDASGKRVYYLTRDPTTPLARAAWETARHTPVNSWLGNIIMYAPTLWARMILMTHFFSILLAQEQLEKTLDCQIYGACYSIEPLDLPQIIQRLHGLSAFSLHSYSPGEANRVVSCLRKLGVPPLRVWRHRARSVRARLLSQGGRAATCGKYLFNWAVRTKLKLTPIPAASQLDLSSWFVAGYSGGDIYHSLSRARPRWFMWCLLLLSVGVGIYLLPNR

SEQ ID NO: 25 - protein, 591 aa, Artificial Sequence
  Synthetic peptide
SMSYTWTGALITPCAAEETKLPINALSNSLLRHHNLVYATTSRSASLRQKKVTFDRLQVLDDHYRDVLKEMKAKASTVKAKLLSVEEACKLTPPHSARSKFGYGAKDVRNLSSKAVNHIRSVWKDLLEDTETPIDTTIMAKNEVFCVQPEKGGRKPARLIVFPDLGVRVCEKMALYDVVSTLPQAVMGSSYGFQYSPGQRVEFLVNAWKAKKCPMGFAYDTRCFDSTVTENDIRVEESIYQCCDLAPEARQAIRSLTERLYIGGPLTNSKGQNCGYRRCRASGVLTTSCGNTLTCYLKAAAACRAAKLQDCTMLVCGDDLVVICESAGTQEDEASLRAFTEAMTRYSAPPGDPPKPEYDLELITSCSSNVSVAHDASGKRVYYLTRDPTTPLARAAWETARHTPVNSWLGNIIMYAPTLWARMILMTHFFSILLAQEQLEKTLDCQIYGACYSIEPLDLPQIIQRLHGLSAFSLHSYSPGEANRVISCLRKLGVPPLRVWRHRARSVRARLLSQGGRAATCGKYLFNWAVRTKLKLTPIPAASQLDLSSWFVAGYSGGDIYHSLSRARPRWFMWCLLLLSVGVGIYLLPNR

SEQ ID NO: 26 - protein, 591 aa, Artificial Sequence
  Synthetic peptide
SMSYTWTGALITPCAAEETKLPINALSNSLLRHHNLVYATTSRSASLRQKKVTFDRLQVLDDHYRDVLKEMKAKASTVKAKLLSVEEACKLTPPHSARSKFGYGAKDVRNLSSKAVNHIRSVWKDLLEDTETPIDTTIMAKNEVFCVQPEKGGRKPARLIVFPDLGVRVCEKMALYDVVSTLPQAVMGSSYGFQYSPGQRVEFLVNAWKAKKCPMGFAYDTRCFDSTVTENDIRVEESIYQCCDLAPEARQAIRSLTERLYIGGPLTNSKGQNCGYRRCRASGVLTTSCGNTLTCYLKAAAACRAAKLQDCTMLVCGDDLVVICESAGTQEDEASLRAFTEAMTRYSAPPGDPPKPEYDLELITSCSSNVSVAHDASGKRVYYLTRDPTTPLARAAWETARHTPVNSWLGNIIMYAPTLWARMILMTHFFSILLAQEQLEKTLDCQIYGACYSIEPLDLPQIIQRLHGLSAFSLHSYSPGEANRVTSCLRKLGVPPLRVWRHRARSVRARLLSQGGRAATCGKYLFNWAVRTKLKLTPIPAASQLDLSSWFVAGYSGGDIYHSLSRARPRWFMWCLLLLSVGVGIYLLPNR

SEQ ID NO: 27 - protein, 591 aa, Artificial Sequence
  Synthetic peptide
SMSYTWTGALITPCAAEETKLPINALSNSLLRHHNLVYATTSRSASLRQKKVTFDRLQVLDDHYRDVLKEMKAKASTVKAKLLSVEEACKLTPPHSARSKFGYGAKDVRNLSSKAVNHIRSVWKDLLEDTETPIDTTIMAKNEVFCVQPEKGGRKPARLIVFPDLGVRVCEKMALYDVVSTLPQAVMGSSYGFQYSPGQRVEFLVNAWKAKKCPMGFAYDTRCFDSTVTENDIRVEESIYQCCDLAPEARQAIRSLTERLYIGGPLTNSKGQNCGYRRCRASGVLTTSCGNTLTCYLKAAAACRAAKLQDCTMLVCGDDLVVICESAGTQEDEASLRAFTEAMTRYSAPPGDPPKPEYDLELITSCSSNVSVAHDASGKRVYYLTRDPTTPLARAAWETARHTPVNSWLGNIIMYAPTLWARMILMTHFFSILLAQEQLEKTLDCQIYGACYSIEPLDLPQIIQRLHGLSAFSLHSYSPGEANRVSSCLRKLGVPPLRVWRHRARSVRARLLSQGGRAATCGKYLFNWAVRTKLKLTPIPAASQLDLSSWFVAGYSGGDIYHSLSRARPRWFMWCLLLLSVGVGIYLLPNR

SEQ ID NO: 28 - protein, 591 aa, Artificial Sequence
  Synthetic peptide
SMSYTWTGALITPCAAEETKLPINALSNSLLRHHNLVYATTSRSASLRQKKVTFDRLQVLDDHYRDVLKEMKAKASTVKAKLLSVEEACKLTPPHSARSKFGYGAKDVRNLSSKAVNHIRSVWKDLLEDTETPIDTTIMAKNEVFCVQPEKGGRKPARLIVFPDLGVRVCEKMALYDVVSTLPQAVMGSSYGFQYSPGQRVEFLVNAWKAKKCPMGFAYDTRCFDSTVTENDIRVEESIYQCCDLAPEARQAIRSLTERLYIGGPLTNSKGQNCGYRRCRASGVLTTSCGNTLTCYLKAAAACRAAKLQDCTMLVCGDDLVVICESAGTQEDEASLRAFTEAMTRYSAPPGDPPKPEYDLELITSCSSNVSVAHDASGKRVYYLTRDPTTPLARAAWETARHTPVNSWLGNIIMYAPTLWARMILMTHFFSILLAQEQLEKTLDCQIYGACYSIEPLDLPQIIQRLHGLSAFSLHSYSPGEANRVASCLRKLGIPPLRVWRHRARSVRARLLSQGGRAATCGKYLFNWAVRTKLKLTPIPAASQLDLSSWFVAGYSGGDIYHSLSRARPRWFMWCLLLLSVGVGIYLLPNR

SEQ ID NO: 29 - protein, 591 aa, Artificial Sequence
  Synthetic peptid
SMSYTWTGALITPCAAEETKLPINALSNSLLRHHNLVYATTSRSASLRQKKVTFDRLQVLDDHYRDVLKEMKAKASTVKAKLLSVEEACKLTPPHSARSKFGYGAKDVRNLSSKAVNHIRSVWKDLLEDTETPIDTTIMAKNEVFCVQPEKGGRKPARLIVFPDLGVRVCEKMALYDVVSTLPQAVMGSSYGFQYSPGQRVEFLVNAWKAKKCPMGFAYDTRCFDSTVTENDIRVEESIYQCCDLAPEARQAIRSLTERLYIGGPLTNSKGQNCGYRRCRASGVLTTSCGNTLTCYLKAAAACRAAKLQDCTMLVCGDDLVVICESAGTQEDEASLRAFTEAMTRYSAPPGDPPKPEYDLELITSCSSNVSVAHDASGKRVYYLTRDPTTPLARAAWETARHTPVNSWLGNIIMYAPTLWARMILMTHFFSILLAQEQLEKTLDCQIYGACYSIEPLDLPQIIQRLHGLSAFSLHSYSPGEANRVVSCLRKLGIPPLRVWRHRARSVRARLLSQGGRAATCGKYLFNWAVRTKLKLTPIPAASQLDLSSWFVAGYSGGDIYHSLSRARPRWFMWCLLLLSVGVGIYLLPNR

SEQ ID NO: 30 - protein, 591 aa, Artificial Sequence
  Synthetic peptide
SMSYTWTGALITPCAAEETKLPINALSNSLLRHHNLVYATTSRSASLRQKKVTFDRLQVLDDHYRDVLKEMKAKASTVKAKLLSVEEACKLTPPHSARSKFGYGAKDVRNLSSKAVNHIRSVWKDLLEDTETPIDTTIMAKNEVFCVQPEKGGRKPARLIVFPDLGVRVCEKMALYDVVSTLPQAVMGSSYGFQYSPGQRVEFLVNAWKAKKCPMGFAYDTRCFDSTVTENDIRVEESIYQCCDLAPEARQAIRSLTERLYIGGPLTNSKGQNCGYRRCRASGVLTTSCGNTLTCYLKAAAACRAAKLQDCTMLVCGDDLVVICESAGTQEDEASLRAFTEAMTRYSAPPGDPPKPEYDLELITSCSSNVSVAHDASGKRVYYLTRDPTTPLARAAWETARHTPVNSWLGNIIMYAPTLWARMILMTHFFSILLAQEQLEKTLDCQIYGACYSIEPLDLPQIIQRLHGLSAFSLHSYSPGEANRVISCLRKLGIPPLRVWRHRARSVRARLLSQGGRAATCGKYLFNWAVRTKLKLTPIPAASQLDLSSWFVAGYSGGDIYHSLSRARPRWFMWCLLLLSVGVGIYLLPNR

SEQ ID NO: 31 - protein, 591 aa, Artificial Sequence
  Synthetic peptide
SMSYTWTGALITPCAAEETKLPINALSNSLLRHHNLVYATTSRSASLRQKKVTFDRLQVLDDHYRDVLKEMKAKASTVKAKLLSVEEACKLTPPHSARSKFGYGAKDVRNLSSKAVNHIRSVWKDLLEDTETPIDTTIMAKNEVFCVQPEKGGRKPARLIVFPDLGVRVCEKMALYDVVSTLPQAVMGSSYGFQYSPGQRVEFLVNAWKAKKCPMGFAYDTRCFDSTVTENDIRVEESIYQCCDLAPEARQAIRSLTERLYIGGPLTNSKGQNCGYRRCRASGVLTTSCGNTLTCYLKAAAACRAAKLQDCTMLVCGDDLVVICESAGTQEDEASLRAFTEAMTRYSAPPGDPPKPEYDLELITSCSSNVSVAHDASGKRVYYLTRDPTTPLARAAWETARHTPVNSWLGNIIMYAPTLWARMILMTHFFSILLAQEQLEKTLDCQIYGACYSIEPLDLPQIIQRLHGLSAFSLHSYSPGEANRVTSCLRKLGIPPLRVWRHRARSVRARLLSQGGRAATCGKYLFNWAVRTKLKLTPIPAASQLDLSSWFVAGYSGGDIYHSLSRARPRWFMWCLLLLSVGVGIYLLPNR

SEQ ID NO: 32 - protein, 591 aa, Artificial Sequence
  Synthetic peptide
SMSYTWTGALITPCAAEETKLPINALSNSLLRHHNLVYATTSRSASLRQKKVTFDRLQVLDDHYRDVLKEMKAKASTVKAKLLSVEEACKLTPPHSARSKFGYGAKDVRNLSSKAVNHIRSVWKDLLEDTETPIDTTIMAKNEVFCVQPEKGGRKPARLIVFPDLGVRVCEKMALYDVVSTLPQAVMGSSYGFQYSPGQRVEFLVNAWKAKKCPMGFAYDTRCFDSTVTENDIRVEESIYQCCDLAPEARQAIRSLTERLYIGGPLTNSKGQNCGYRRCRASGVLTTSCGNTLTCYLKAAAACRAAKLQDCTMLVCGDDLVVICESAGTQEDEASLRAFTEAMTRYSAPPGDPPKPEYDLELITSCSSNVSVAHDASGKRVYYLTRDPTTPLARAAWETARHTPVNSWLGNIIMYAPTLWARMILMTHFFSILLAQEQLEKTLDCQIYGACYSIEPLDLPQIIQRLHGLSAFSLHSYSPGEANRVSSCLRKLGIPPLRVWRHRARSVRARLLSQGGRAATCGKYLFNWAVRTKLKLTPIPAASQLDLSSWFVAGYSGGDIYHSLSRARPRWFMWCLLLLSVGVGIYLLPNR

SEQ ID NO: 33 - protein, 591 aa, Artificial Sequence
  Synthetic peptide
SMSYTWTGALITPCAAEETKLPINALSNSLLRHHNLVYATTSRSASLRQKKVTFDRLQVLDDHYRDVLKEMKAKASTVKAKLLSVEEACKLTPPHSARSKFGYGAKDVRNLSSKAVNHIRSVWKDLLEDTETPIDTTIMAKNEVFCVQPEKGGRKPARLIVFPDLGVRVCEKMALYDVVSTLPQAVMGSSYGFQYSPGQRVEFLVNAWKAKKCPMGFAYDTRCFDSTVTENDIRVEESIYQCCDLAPEARQAIRSLTERLYIGGPLTNSKGQNCGYRRCRASGVLTTSCGNTLTCYLKAAAACRAAKLQDCTMLVCGDDLVVICESAGTQEDEASLRAFTEAMTRYSAPPGDPPKPEYDLELITSCSSNVSVAHDASGKRVYYLTRDPTTPLARAAWETARHTPVNSWLGNIIMYAPTLWARAILMTHFFSILLAQEQLEKTLDCQIYGACYSIEPLDLPQIIQRLHGLSAFSLHSYSPGEANRVASCLRKLGVPPLRVWRHRARSVRARLLSQGGRAATCGKYLFNWAVRTKLKLTPIPAASQLDLSSWFVAGYSGGDIYHSLSRARPRWFMWCLLLLSVGVGIYLLPNR

SEQ ID NO: 34 - protein, 591 aa, Artificial Sequence
  Synthetic peptide
SMSYTWTGALITPCAAEETKLPINALSNSLLRHHNLVYATTSRSASLRQKKVTFDRLQVLDDHYRDVLKEMKAKASTVKAKLLSVEEACKLTPPHSARSKFGYGAKDVRNLSSKAVNHIRSVWKDLLEDTETPIDTTIMAKNEVFCVQPEKGGRKPARLIVFPDLGVRVCEKMALYDVVSTLPQAVMGSSYGFQYSPGQRVEFLVNAWKAKKCPMGFAYDTRCFDSTVTENDIRVEESIYQCCDLAPEARQAIRSLTERLYIGGPLTNSKGQNCGYRRCRASGVLTTSCGNTLTCYLKAAAACRAAKLQDCTMLVCGDDLVVICESAGTQEDEASLRAFTEAMTRYSAPPGDPPKPEYDLELITSCSSNVSVAHDASGKRVYYLTRDPTTPLARAAWETARHTPVNSWLGNIIMYAPTLWARAILMTHFFSILLAQEQLEKTLDCQIYGACYSIEPLDLPQIIQRLHGLSAFSLHSYSPGEANRVVSCLRKLGVPPLRVWRHRARSVRARLLSQGGRAATCGKYLFNWAVRTKLKLTPIPAASQLDLSSWFVAGYSGGDIYHSLSRARPRWFMWCLLLLSVGVGIYLLPNR

SEQ ID NO: 35 - protein, 591 aa, Artificial Sequence
  Synthetic peptide
SMSYTWTGALITPCAAEETKLPINALSNSLLRHHNLVYATTSRSASLRQKKVTFDRLQVLDDHYRDVLKEMKAKASTVKAKLLSVEEACKLTPPHSARSKFGYGAKDVRNLSSKAVNHIRSVWKDLLEDTETPIDTTIMAKNEVFCVQPEKGGRKPARLIVFPDLGVRVCEKMALYDVVSTLPQAVMGSSYGFQYSPGQRVEFLVNAWKAKKCPMGFAYDTRCFDSTVTENDIRVEESIYQCCDLAPEARQAIRSLTERLYIGGPLTNSKGQNCGYRRCRASGVLTTSCGNTLTCYLKAAAACRAAKLQDCTMLVCGDDLVVICESAGTQEDEASLRAFTEAMTRYSAPPGDPPKPEYDLELITSCSSNVSVAHDASGKRVYYLTRDPTTPLARAAWETARHTPVNSWLGNIIMYAPTLWARAILMTHFFSILLAQEQLEKTLDCQIYGACYSIEPLDLPQIIQRLHGLSAFSLHSYSPGEANRVISCLRKLGVPPLRVWRHRARSVRARLLSQGGRAATCGKYLFNWAVRTKLKLTPIPAASQLDLSSWFVAGYSGGDIYHSLSRARPRWFMWCLLLLSVGVGIYLLPNR

SEQ ID NO: 36 - protein, 591 aa, Artificial Sequence
  Synthetic peptide
SMSYTWTGALITPCAAEETKLPINALSNSLLRHHNLVYATTSRSASLRQKKVTFDRLQVLDDHYRDVLKEMKAKASTVKAKLLSVEEACKLTPPHSARSKFGYGAKDVRNLSSKAVNHIRSVWKDLLEDTETPIDTTIMAKNEVFCVQPEKGGRKPARLIVFPDLGVRVCEKMALYDVVSTLPQAVMGSSYGFQYSPGQRVEFLVNAWKAKKCPMGFAYDTRCFDSTVTENDIRVEESIYQCCDLAPEARQAIRSLTERLYIGGPLTNSKGQNCGYRRCRASGVLTTSCGNTLTCYLKAAAACRAAKLQDCTMLVCGDDLVVICESAGTQEDEASLRAFTEAMTRYSAPPGDPPKPEYDLELITSCSSNVSVAHDASGKRVYYLTRDPTTPLARAAWETARHTPVNSWLGNIIMYAPTLWARAILMTHFFSILLAQEQLEKTLDCQIYGACYSIEPLDLPQIIQRLHGLSAFSLHSYSPGEANRVTSCLRKLGVPPLRVWRHRARSVRARLLSQGGRAATCGKYLFNWAVRTKLKLTPIPAASQLDLSSWFVAGYSGGDIYHSLSRARPRWFMWCLLLLSVGVGIYLLPNR

SEQ ID NO: 37 - protein, 591 aa, Artificial Sequence
  Synthetic peptide
SMSYTWTGALITPCAAEETKLPINALSNSLLRHHNLVYATTSRSASLRQKKVTFDRLQVLDDHYRDVLKEMKAKASTVKAKLLSVEEACKLTPPHSARSKFGYGAKDVRNLSSKAVNHIRSVWKDLLEDTETPIDTTIMAKNEVFCVQPEKGGRKPARLIVFPDLGVRVCEKMALYDVVSTLPQAVMGSSYGFQYSPGQRVEFLVNAWKAKKCPMGFAYDTRCFDSTVTENDIRVEESIYQCCDLAPEARQAIRSLTERLYIGGPLTNSKGQNCGYRRCRASGVLTTSCGNTLTCYLKAAAACRAAKLQDCTMLVCGDDLVVICESAGTQEDEASLRAFTEAMTRYSAPPGDPPKPEYDLELITSCSSNVSVAHDASGKRVYYLTRDPTTPLARAAWETARHTPVNSWLGNIIMYAPTLWARAILMTHFFSILLAQEQLEKTLDCQIYGACYSIEPLDLPQIIQRLHGLSAFSLHSYSPGEANRVSSCLRKLGVPPLRVWRHRARSVRARLLSQGGRAATCGKYLFNWAVRTKLKLTPIPAASQLDLSSWFVAGYSGGDIYHSLSRARPRWFMWCLLLLSVGVGIYLLPNR

SEQ ID NO: 38 - protein, 591 aa, Artificial Sequence
  Synthetic peptide
SMSYTWTGALITPCAAEETKLPINALSNSLLRHHNLVYATTSRSASLRQKKVTFDRLQVLDDHYRDVLKEMKAKASTVKAKLLSVEEACKLTPPHSARSKFGYGAKDVRNLSSKAVNHIRSVWKDLLEDTETPIDTTIMAKNEVFCVQPEKGGRKPARLIVFPDLGVRVCEKMALYDVVSTLPQAVMGSSYGFQYSPGQRVEFLVNAWKAKKCPMGFAYDTRCFDSTVTENDIRVEESIYQCCDLAPEARQAIRSLTERLYIGGPLTNSKGQNCGYRRCRASGVLTTSCGNTLTCYLKAAAACRAAKLQDCTMLVCGDDLVVICESAGTQEDEASLRAFTEAMTRYSAPPGDPPKPEYDLELITSCSSNVSVAHDASGKRVYYLTRDPTTPLARAAWETARHTPVNSWLGNIIMYAPTLWARAILMTHFFSILLAQEQLEKTLDCQIYGACYSIEPLDLPQIIQRLHGLSAFSLHSYSPGEANRVASCLRKLGIPPLRVWRHRARSVRARLLSQGGRAATCGKYLFNWAVRTKLKLTPIPAASQLDLSSWFVAGYSGGDIYHSLSRARPRWFMWCLLLLSVGVGIYLLPNR

SEQ ID NO: 39 - protein, 591 aa, Artificial Sequence
  Synthetic peptide
SMSYTWTGALITPCAAEETKLPINALSNSLLRHHNLVYATTSRSASLRQKKVTFDRLQVLDDHYRDVLKEMKAKASTVKAKLLSVEEACKLTPPHSARSKFGYGAKDVRNLSSKAVNHIRSVWKDLLEDTETPIDTTIMAKNEVFCVQPEKGGRKPARLIVFPDLGVRVCEKMALYDVVSTLPQAVMGSSYGFQYSPGQRVEFLVNAWKAKKCPMGFAYDTRCFDSTVTENDIRVEESIYQCCDLAPEARQAIRSLTERLYIGGPLTNSKGQNCGYRRCRASGVLTTSCGNTLTCYLKAAAACRAAKLQDCTMLVCGDDLVVICESAGTQEDEASLRAFTEAMTRYSAPPGDPPKPEYDLELITSCSSNVSVAHDASGKRVYYLTRDPTTPLARAAWETARHTPVNSWLGNIIMYAPTLWARAILMTHFFSILLAQEQLEKTLDCQIYGACYSIEPLDLPQIIQRLHGLSAFSLHSYSPGEANRVVSCLRKLGIPPLRVWRHRARSVRARLLSQGGRAATCGKYLFNWAVRTKLKLTPIPAASQLDLSSWFVAGYSGGDIYHSLSRARPRWFMWCLLLLSVGVGIYLLPNR

SEQ ID NO: 40 - protein, 591 aa, Artificial Sequence
  Synthetic peptide
SMSYTWTGALITPCAAEETKLPINALSNSLLRHHNLVYATTSRSASLRQKKVTFDRLQVLDDHYRDVLKEMKAKASTVKAKLLSVEEACKLTPPHSARSKFGYGAKDVRNLSSKAVNHIRSVWKDLLEDTETPIDTTIMAKNEVFCVQPEKGGRKPARLIVFPDLGVRVCEKMALYDVVSTLPQAVMGSSYGFQYSPGQRVEFLVNAWKAKKCPMGFAYDTRCFDSTVTENDIRVEESIYQCCDLAPEARQAIRSLTERLYIGGPLTNSKGQNCGYRRCRASGVLTTSCGNTLTCYLKAAAACRAAKLQDCTMLVCGDDLVVICESAGTQEDEASLRAFTEAMTRYSAPPGDPPKPEYDLELITSCSSNVSVAHDASGKRVYYLTRDPTTPLARAAWETARHTPVNSWLGNIIMYAPTLWARAILMTHFFSILLAQEQLEKTLDCQIYGACYSIEPLDLPQIIQRLHGLSAFSLHSYSPGEANRVISCLRKLGIPPLRVWRHRARSVRARLLSQGGRAATCGKYLFNWAVRTKLKLTPIPAASQLDLSSWFVAGYSGGDIYHSLSRARPRWFMWCLLLLSVGVGIYLLPNR

SEQ ID NO: 41 - protein, 591 aa, Artificial Sequence
  Synthetic peptide
SMSYTWTGALITPCAAEETKLPINALSNSLLRHHNLVYATTSRSASLRQKKVTFDRLQVLDDHYRDVLKEMKAKASTVKAKLLSVEEACKLTPPHSARSKFGYGAKDVRNLSSKAVNHIRSVWKDLLEDTETPIDTTIMAKNEVFCVQPEKGGRKPARLIVFPDLGVRVCEKMALYDVVSTLPQAVMGSSYGFQYSPGQRVEFLVNAWKAKKCPMGFAYDTRCFDSTVTENDIRVEESIYQCCDLAPEARQAIRSLTERLYIGGPLTNSKGQNCGYRRCRASGVLTTSCGNTLTCYLKAAAACRAAKLQDCTMLVCGDDLVVICESAGTQEDEASLRAFTEAMTRYSAPPGDPPKPEYDLELITSCSSNVSVAHDASGKRVYYLTRDPTTPLARAAWETARHTPVNSWLGNIIMYAPTLWARAILMTHFFSILLAQEQLEKTLDCQIYGACYSIEPLDLPQIIQRLHGLSAFSLHSYSPGEANRVTSCLRKLGIPPLRVWRHRARSVRARLLSQGGRAATCGKYLFNWAVRTKLKLTPIPAASQLDLSSWFVAGYSGGDIYHSLSRARPRWFMWCLLLLSVGVGIYLLPNR

SEQ ID NO: 42 - protein, 591 aa, Artificial Sequence
  Synthetic peptide
SMSYTWTGALITPCAAEETKLPINALSNSLLRHHNLVYATTSRSASLRQKKVTFDRLQVLDDHYRDVLKEMKAKASTVKAKLLSVEEACKLTPPHSARSKFGYGAKDVRNLSSKAVNHIRSVWKDLLEDTETPIDTTIMAKNEVFCVQPEKGGRKPARLIVFPDLGVRVCEKMALYDVVSTLPQAVMGSSYGFQYSPGQRVEFLVNAWKAKKCPMGFAYDTRCFDSTVTENDIRVEESIYQCCDLAPEARQAIRSLTERLYIGGPLTNSKGQNCGYRRCRASGVLTTSCGNTLTCYLKAAAACRAAKLQDCTMLVCGDDLVVICESAGTQEDEASLRAFTEAMTRYSAPPGDPPKPEYDLELITSCSSNVSVAHDASGKRVYYLTRDPTTPLARAAWETARHTPVNSWLGNIIMYAPTLWARAILMTHFFSILLAQEQLEKTLDCQIYGACYSIEPLDLPQIIQRLHGLSAFSLHSYSPGEANRVSSCLRKLGIPPLRVWRHRARSVRARLLSQGGRAATCGKYLFNWAVRTKLKLTPIPAASQLDLSSWFVAGYSGGDIYHSLSRARPRWFMWCLLLLSVGVGIYLLPNR

SEQ ID NO: 43 - protein, 591 aa, Artificial Sequence
  Synthetic peptide
SMSYTWTGALITPCAAEETKLPINALSNSLLRHHNLVYATTSRSASLRQKKVTFDRLQVLDDHYRDVLKEMKAKASTVKAKLLSVEEACKLTPPHSARSKFGYGAKDVRNLSSKAVNHIRSVWKDLLEDTETPIDTTIMAKNEVFCVQPEKGGRKPARLIVFPDLGVRVCEKMALYDVVSTLPQAVMGSSYGFQYSPGQRVEFLVNAWKAKKCPMGFAYDTRCFDSTVTENDIRVEESIYQCCDLAPEARQAIRSLTERLYIGGPLTNSKGQNCGYRRCRASGVLTTSCGNTLTCYLKAAAACRAAKLQDCTMLVCGDDLVVICESAGTQEDEASLRAFTEAMTRYSAPPGDPPKPEYDLELITSCSSNVSVAHDASGKRVYYLTRDPTTPLARAAWETARHTPVNSWLGNIIMYAPTLWARMILMTHFFSILLAQEQLEKTLDCQIYGACYSIEPLDLPQIIQRLHGLSAFSLHSYSPGEYNRVASCLRKLGVPPLRVWRHRARSVRARLLSQGGRAATCGKYLFNWAVRTKLKLTPIPAASQLDLSSWFVAGYSGGDIYHSLSRARPRWFMWCLLLLSVGVGIYLLPNR

SEQ ID NO: 44 - protein, 591 aa, Artificial Sequence
  Synthetic peptide
SMSYTWTGALITPCAAEETKLPINALSNSLLRHHNLVYATTSRSASLRQKKVTFDRLQVLDDHYRDVLKEMKAKASTVKAKLLSVEEACKLTPPHSARSKFGYGAKDVRNLSSKAVNHIRSVWKDLLEDTETPIDTTIMAKNEVFCVQPEKGGRKPARLIVFPDLGVRVCEKMALYDVVSTLPQAVMGSSYGFQYSPGQRVEFLVNAWKAKKCPMGFAYDTRCFDSTVTENDIRVEESIYQCCDLAPEARQAIRSLTERLYIGGPLTNSKGQNCGYRRCRASGVLTTSCGNTLTCYLKAAAACRAAKLQDCTMLVCGDDLVVICESAGTQEDEASLRAFTEAMTRYSAPPGDPPKPEYDLELITSCSSNVSVAHDASGKRVYYLTRDPTTPLARAAWETARHTPVNSWLGNIIMYAPTLWARMILMTHFFSILLAQEQLEKTLDCQIYGACYSIEPLDLPQIIQRLHGLSAFSLHSYSPGEYNRVVSCLRKLGVPPLRVWRHRARSVRARLLSQGGRAATCGKYLFNWAVRTKLKLTPIPAASQLDLSSWFVAGYSGGDIYHSLSRARPRWFMWCLLLLSVGVGIYLLPNR

SEQ ID NO: 45 - protein, 591 aa, Artificial Sequence
  Synthetic peptide
SMSYTWTGALITPCAAEETKLPINALSNSLLRHHNLVYATTSRSASLRQKKVTFDRLQVLDDHYRDVLKEMKAKASTVKAKLLSVEEACKLTPPHSARSKFGYGAKDVRNLSSKAVNHIRSVWKDLLEDTETPIDTTIMAKNEVFCVQPEKGGRKPARLIVFPDLGVRVCEKMALYDVVSTLPQAVMGSSYGFQYSPGQRVEFLVNAWKAKKCPMGFAYDTRCFDSTVTENDIRVEESIYQCCDLAPEARQAIRSLTERLYIGGPLTNSKGQNCGYRRCRASGVLTTSCGNTLTCYLKAAAACRAAKLQDCTMLVCGDDLVVICESAGTQEDEASLRAFTEAMTRYSAPPGDPPKPEYDLELITSCSSNVSVAHDASGKRVYYLTRDPTTPLARAAWETARHTPVNSWLGNIIMYAPTLWARMILMTHFFSILLAQEQLEKTLDCQIYGACYSIEPLDLPQIIQRLHGLSAFSLHSYSPGETNRVISCLRKLGVPPLRVWRHRARSVRARLLSQGGRAATCGKYLFNWAVRTKLKLTPIPAASQLDLSSWFVAGYSGGDIYHSLSRARPRWFMWCLLLLSVGVGIYLLPNR

SEQ ID NO: 46 - protein, 591 aa, Artificial Sequence
  Synthetic peptid
SMSYTWTGALITPCAAEETKLPINALSNSLLRHHNLVYATTSRSASLRQKKVTFDRLQVLDDHYRDVLKEMKAKASTVKAKLLSVEEACKLTPPHSARSKFGYGAKDVRNLSSKAVNHIRSVWKDLLEDTETPIDTTIMAKNEVFCVQPEKGGRKPARLIVFPDLGVRVCEKMALYDVVSTLPQAVMGSSYGFQYSPGQRVEFLVNAWKAKKCPMGFAYDTRCFDSTVTENDIRVEESIYQCCDLAPEARQAIRSLTERLYIGGPLTNSKGQNCGYRRCRASGVLTTSCGNTLTCYLKAAAACRAAKLQDCTMLVCGDDLVVICESAGTQEDEASLRAFTEAMTRYSAPPGDPPKPEYDLELITSCSSNVSVAHDASGKRVYYLTRDPTTPLARAAWETARHTPVNSWLGNIIMYAPTLWARMILMTHFFSILLAQEQLEKTLDCQIYGACYSIEPLDLPQIIQRLHGLSAFSLHSYSPGETNRVTSCLRKLGVPPLRVWRHRARSVRARLLSQGGRAATCGKYLFNWAVRTKLKLTPIPAASQLDLSSWFVAGYSGGDIYHSLSRARPRWFMWCLLLLSVGVGIYLLPNR

SEQ ID NO: 47 - protein, 591 aa, Artificial Sequence
  Synthetic peptide
SMSYTWTGALITPCAAEETKLPINALSNSLLRHHNLVYATTSRSASLRQKKVTFDRLQVLDDHYRDVLKEMKAKASTVKAKLLSVEEACKLTPPHSARSKFGYGAKDVRNLSSKAVNHIRSVWKDLLEDTETPIDTTIMAKNEVFCVQPEKGGRKPARLIVFPDLGVRVCEKMALYDVVSTLPQAVMGSSYGFQYSPGQRVEFLVNAWKAKKCPMGFAYDTRCFDSTVTENDIRVEESIYQCCDLAPEARQAIRSLTERLYIGGPLTNSKGQNCGYRRCRASGVLTTSCGNTLTCYLKAAAACRAAKLQDCTMLVCGDDLVVICESAGTQEDEASLRAFTEAMTRYSAPPGDPPKPEYDLELITSCSSNVSVAHDASGKRVYYLTRDPTTPLARAAWETARHTPVNSWLGNIIMYAPTLWARMILMTHFFSILLAQEQLEKTLDCQIYGACYSIEPLDLPQIIQRLHGLSAFSLHSYSPGETNRVSSCLRKLGVPPLRVWRHRARSVRARLLSQGGRAATCGKYLFNWAVRTKLKLTPIPAASQLDLSSWFVAGYSGGDIYHSLSRARPRWFMWCLLLLSVGVGIYLLPNR

SEQ ID NO: 48 - protein, 591 aa, Artificial Sequence
  Synthetic peptide
SMSYTWTGALITPCAAEETKLPINALSNSLLRHHNLVYATTSRSASLRQKKVTFDRLQVLDDHYRDVLKEMKAKASTVKAKLLSVEEACKLTPPHSARSKFGYGAKDVRNLSSKAVNHIRSVWKDLLEDTETPIDTTIMAKNEVFCVQPEKGGRKPARLIVFPDLGVRVCEKMALYDVVSTLPQAVMGSSYGFQYSPGQRVEFLVNAWKAKKCPMGFAYDTRCFDSTVTENDIRVEESIYQCCDLAPEARQAIRSLTERLYIGGPLTNSKGQNCGYRRCRASGVLTTSCGNTLTCYLKAAAACRAAKLQDCTMLVCGDDLVVICESAGTQEDEASLRAFTEAMTRYSAPPGDPPKPEYDLELITSCSSNVSVAHDASGKRVYYLTRDPTTPLARAAWETARHTPVNSWLGNIIMYAPTLWARMILMTHFFSILLAQEQLEKTLDCQIYGACYSIEPLDLPQIIQRLHGLSAFSLHSYSPGETNRVASCLRKLGIPPLRVWRHRARSVRARLLSQGGRAATCGKYLFNWAVRTKLKLTPIPAASQLDLSSWFVAGYSGGDIYHSLSRARPRWFMWCLLLLSVGVGIYLLPNR

SEQ ID NO: 49 - protein, 591 aa, Artificial Sequence
  Synthetic peptide
SMSYTWTGALITPCAAEETKLPINALSNSLLRHHNLVYATTSRSASLRQKKVTFDRLQVLDDHYRDVLKEMKAKASTVKAKLLSVEEACKLTPPHSARSKFGYGAKDVRNLSSKAVNHIRSVWKDLLEDTETPIDTTIMAKNEVFCVQPEKGGRKPARLIVFPDLGVRVCEKMALYDVVSTLPQAVMGSSYGFQYSPGQRVEFLVNAWKAKKCPMGFAYDTRCFDSTVTENDIRVEESIYQCCDLAPEARQAIRSLTERLYIGGPLTNSKGQNCGYRRCRASGVLTTSCGNTLTCYLKAAAACRAAKLQDCTMLVCGDDLVVICESAGTQEDEASLRAFTEAMTRYSAPPGDPPKPEYDLELITSCSSNVSVAHDASGKRVYYLTRDPTTPLARAAWETARHTPVNSWLGNIIMYAPTLWARMILMTHFFSILLAQEQLEKTLDCQIYGACYSIEPLDLPQIIQRLHGLSAFSLHSYSPGETNRVVSCLRKLGIPPLRVWRHRARSVRARLLSQGGRAATCGKYLFNWAVRTKLKLTPIPAASQLDLSSWFVAGYSGGDIYHSLSRARPRWFMWCLLLLSVGVGIYLLPNR

SEQ ID NO: 50 - protein, 591 aa, Artificial Sequence
  Synthetic peptide
SMSYTWTGALITPCAAEETKLPINALSNSLLRHHNLVYATTSRSASLRQKKVTFDRLQVLDDHYRDVLKEMKAKASTVKAKLLSVEEACKLTPPHSARSKFGYGAKDVRNLSSKAVNHIRSVWKDLLEDTETPIDTTIMAKNEVFCVQPEKGGRKPARLIVFPDLGVRVCEKMALYDVVSTLPQAVMGSSYGFQYSPGQRVEFLVNAWKAKKCPMGFAYDTRCFDSTVTENDIRVEESIYQCCDLAPEARQAIRSLTERLYIGGPLTNSKGQNCGYRRCRASGVLTTSCGNTLTCYLKAAAACRAAKLQDCTMLVCGDDLVVICESAGTQEDEASLRAFTEAMTRYSAPPGDPPKPEYDLELITSCSSNVSVAHDASGKRVYYLTRDPTTPLARAAWETARHTPVNSWLGNIIMYAPTLWARMILMTHFFSILLAQEQLEKTLDCQIYGACYSIEPLDLPQIIQRLHGLSAFSLHSYSPGETNRVISCLRKLGIPPLRVWRHRARSVRARLLSQGGRAATCGKYLFNWAVRTKLKLTPIPAASQLDLSSWFVAGYSGGDIYHSLSRARPRWFMWCLLLLSVGVGIYLLPNR

SEQ ID NO: 51 - protein, 591 aa, Artificial Sequence
  Synthetic peptide
SMSYTWTGALITPCAAEETKLPINALSNSLLRHHNLVYATTSRSASLRQKKVTFDRLQVLDDHYRDVLKEMKAKASTVKAKLLSVEEACKLTPPHSARSKFGYGAKDVRNLSSKAVNHIRSVWKDLLEDTETPIDTTIMAKNEVFCVQPEKGGRKPARLIVFPDLGVRVCEKMALYDVVSTLPQAVMGSSYGFQYSPGQRVEFLVNAWKAKKCPMGFAYDTRCFDSTVTENDIRVEESIYQCCDLAPEARQAIRSLTERLYIGGPLTNSKGQNCGYRRCRASGVLTTSCGNTLTCYLKAAAACRAAKLQDCTMLVCGDDLVVICESAGTQEDEASLRAFTEAMTRYSAPPGDPPKPEYDLELITSCSSNVSVAHDASGKRVYYLTRDPTTPLARAAWETARHTPVNSWLGNIIMYAPTLWARMILMTHFFSILLAQEQLEKTLDCQIYGACYSIEPLDLPQIIQRLHGLSAFSLHSYSPGETNRVTSCLRKLGIPPLRVWRHRARSVRARLLSQGGRAATCGKYLFNWAVRTKLKLTPIPAASQLDLSSWFVAGYSGGDIYHSLSRARPRWFMWCLLLLSVGVGIYLLPNR

SEQ ID NO: 52 - protein, 591 aa, Artificial Sequence
  Synthetic peptide
SMSYTWTGALITPCAAEETKLPINALSNSLLRHHNLVYATTSRSASLRQKKVTFDRLQVLDDHYRDVLKEMKAKASTVKAKLLSVEEACKLTPPHSARSKFGYGAKDVRNLSSKAVNHIRSVWKDLLEDTETPIDTTIMAKNEVFCVQPEKGGRKPARLIVFPDLGVRVCEKMALYDVVSTLPQAVMGSSYGFQYSPGQRVEFLVNAWKAKKCPMGFAYDTRCFDSTVTENDIRVEESIYQCCDLAPEARQAIRSLTERLYIGGPLTNSKGQNCGYRRCRASGVLTTSCGNTLTCYLKAAAACRAAKLQDCTMLVCGDDLVVICESAGTQEDEASLRAFTEAMTRYSAPPGDPPKPEYDLELITSCSSNVSVAHDASGKRVYYLTRDPTTPLARAAWETARHTPVNSWLGNIIMYAPTLWARMILMTHFFSILLAQEQLEKTLDCQIYGACYSIEPLDLPQIIQRLHGLSAFSLHSYSPGETNRVSSCLRKLGIPPLRVWRHRARSVRARLLSQGGRAATCGKYLFNWAVRTKLKLTPIPAASQLDLSSWFVAGYSGGDIYHSLSRARPRWFMWCLLLLSVGVGIYLLPNR

SEQ ID NO: 53 - protein, 591 aa, Artificial Sequence
  Synthetic peptide
SMSYTWTGALITPCAAEETKLPINALSNSLLRHHNLVYATTSRSASLRQKKVTFDRLQVLDDHYRDVLKEMKAKASTVKAKLLSVEEACKLTPPHSARSKFGYGAKDVRNLSSKAVNHIRSVWKDLLEDTETPIDTTIMAKNEVFCVQPEKGGRKPARLIVFPDLGVRVCEKMALYDVVSTLPQAVMGSSYGFQYSPGQRVEFLVNAWKAKKCPMGFAYDTRCFDSTVTENDIRVEESIYQCCDLAPEARQAIRSLTERLYIGGPLTNSKGQNCGYRRCRASGVLTTSCGNTLTCYLKAAAACRAAKLQDCTMLVCGDDLVVICESAGTQEDEASLRAFTEAMTRYSAPPGDPPKPEYDLELITSCSSNVSVAHDASGKRVYYLTRDPTTPLARAAWETARHTPVNSWLGNIIMYAPTLWARAILMTHFFSILLAQEQLEKTLDCQIYGACYSIEPLDLPQIIQRLHGLSAFSLHSYSPGETNRVASCLRKLGVPPLRVWRHRARSVRARLLSQGGRAATCGKYLFNWAVRTKLKLTPIPAASQLDLSSWFVAGYSGGDIYHSLSRARPRWFMWCLLLLSVGVGIYLLPNR

SEQ ID NO: 54 - protein, 591 aa, Artificial Sequence
  Synthetic peptide
SMSYTWTGALITPCAAEETKLPINALSNSLLRHHNLVYATTSRSASLRQKKVTFDRLQVLDDHYRDVLKEMKAKASTVKAKLLSVEEACKLTPPHSARSKFGYGAKDVRNLSSKAVNHIRSVWKDLLEDTETPIDTTIMAKNEVFCVQPEKGGRKPARLIVFPDLGVRVCEKMALYDVVSTLPQAVMGSSYGFQYSPGQRVEFLVNAWKAKKCPMGFAYDTRCFDSTVTENDIRVEESIYQCCDLAPEARQAIRSLTERLYIGGPLTNSKGQNCGYRRCRASGVLTTSCGNTLTCYLKAAAACRAAKLQDCTMLVCGDDLVVICESAGTQEDEASLRAFTEAMTRYSAPPGDPPKPEYDLELITSCSSNVSVAHDASGKRVYYLTRDPTTPLARAAWETARHTPVNSWLGNIIMYAPTLWARAILMTHFFSILLAQEQLEKTLDCQIYGACYSIEPLDLPQIIQRLHGLSAFSLHSYSPGETNRVVSCLRKLGVPPLRVWRHRARSVRARLLSQGGRAATCGKYLFNWAVRTKLKLTPIPAASQLDLSSWFVAGYSGGDIYHSLSRARPRWFMWCLLLLSVGVGIYLLPNR

SEQ ID NO: 55 - protein, 591 aa, Artificial Sequence
  Synthetic peptide
SMSYTWTGALITPCAAEETKLPINALSNSLLRHHNLVYATTSRSASLRQKKVTFDRLQVLDDHYRDVLKEMKAKASTVKAKLLSVEEACKLTPPHSARSKFGYGAKDVRNLSSKAVNHIRSVWKDLLEDTETPIDTTIMAKNEVFCVQPEKGGRKPARLIVFPDLGVRVCEKMALYDVVSTLPQAVMGSSYGFQYSPGQRVEFLVNAWKAKKCPMGFAYDTRCFDSTVTENDIRVEESIYQCCDLAPEARQAIRSLTERLYIGGPLTNSKGQNCGYRRCRASGVLTTSCGNTLTCYLKAAAACRAAKLQDCTMLVCGDDLVVICESAGTQEDEASLRAFTEAMTRYSAPPGDPPKPEYDLELITSCSSNVSVAHDASGKRVYYLTRDPTTPLARAAWETARHTPVNSWLGNIIMYAPTLWARAILMTHFFSILLAQEQLEKTLDCQIYGACYSIEPLDLPQIIQRLHGLSAFSLHSYSPGETNRVISCLRKLGVPPLRVWRHRARSVRARLLSQGGRAATCGKYLFNWAVRTKLKLTPIPAASQLDLSSWFVAGYSGGDIYHSLSRARPRWFMWCLLLLSVGVGIYLLPNR

SEQ ID NO: 56 - protein, 591 aa, Artificial Sequence
  Synthetic peptide
SMSYTWTGALITPCAAEETKLPINALSNSLLRHHNLVYATTSRSASLRQKKVTFDRLQVLDDHYRDVLKEMKAKASTVKAKLLSVEEACKLTPPHSARSKFGYGAKDVRNLSSKAVNHIRSVWKDLLEDTETPIDTTIMAKNEVFCVQPEKGGRKPARLIVFPDLGVRVCEKMALYDVVSTLPQAVMGSSYGFQYSPGQRVEFLVNAWKAKKCPMGFAYDTRCFDSTVTENDIRVEESIYQCCDLAPEARQAIRSLTERLYIGGPLTNSKGQNCGYRRCRASGVLTTSCGNTLTCYLKAAAACRAAKLQDCTMLVCGDDLVVICESAGTQEDEASLRAFTEAMTRYSAPPGDPPKPEYDLELITSCSSNVSVAHDASGKRVYYLTRDPTTPLARAAWETARHTPVNSWLGNIIMYAPTLWARAILMTHFFSILLAQEQLEKTLDCQIYGACYSIEPLDLPQIIQRLHGLSAFSLHSYSPGETNRVTSCLRKLGVPPLRVWRHRARSVRARLLSQGGRAATCGKYLFNWAVRTKLKLTPIPAASQLDLSSWFVAGYSGGDIYHSLSRARPRWFMWCLLLLSVGVGIYLLPNR

SEQ ID NO: 57 - protein, 591 aa, Artificial Sequence
  Synthetic peptid
SMSYTWTGALITPCAAEETKLPINALSNSLLRHHNLVYATTSRSASLRQKKVTFDRLQVLDDHYRDVLKEMKAKASTVKAKLLSVEEACKLTPPHSARSKFGYGAKDVRNLSSKAVNHIRSVWKDLLEDTETPIDTTIMAKNEVFCVQPEKGGRKPARLIVFPDLGVRVCEKMALYDVVSTLPQAVMGSSYGFQYSPGQRVEFLVNAWKAKKCPMGFAYDTRCFDSTVTENDIRVEESIYQCCDLAPEARQAIRSLTERLYIGGPLTNSKGQNCGYRRCRASGVLTTSCGNTLTCYLKAAAACRAAKLQDCTMLVCGDDLVVICESAGTQEDEASLRAFTEAMTRYSAPPGDPPKPEYDLELITSCSSNVSVAHDASGKRVYYLTRDPTTPLARAAWETARHTPVNSWLGNIIMYAPTLWARAILMTHFFSILLAQEQLEKTLDCQIYGACYSIEPLDLPQIIQRLHGLSAFSLHSYSPGETNRVSSCLRKLGVPPLRVWRHRARSVRARLLSQGGRAATCGKYLFNWAVRTKLKLTPIPAASQLDLSSWFVAGYSGGDIYHSLSRARPRWFMWCLLLLSVGVGIYLLPNR

SEQ ID NO: 58 - protein, 591 aa, Artificial Sequence
  Synthetic peptide
SMSYTWTGALITPCAAEETKLPINALSNSLLRHHNLVYATTSRSASLRQKKVTFDRLQVLDDHYRDVLKEMKAKASTVKAKLLSVEEACKLTPPHSARSKFGYGAKDVRNLSSKAVNHIRSVWKDLLEDTETPIDTTIMAKNEVFCVQPEKGGRKPARLIVFPDLGVRVCEKMALYDVVSTLPQAVMGSSYGFQYSPGQRVEFLVNAWKAKKCPMGFAYDTRCFDSTVTENDIRVEESIYQCCDLAPEARQAIRSLTERLYIGGPLTNSKGQNCGYRRCRASGVLTTSCGNTLTCYLKAAAACRAAKLQDCTMLVCGDDLVVICESAGTQEDEASLRAFTEAMTRYSAPPGDPPKPEYDLELITSCSSNVSVAHDASGKRVYYLTRDPTTPLARAAWETARHTPVNSWLGNIIMYAPTLWARAILMTHFFSILLAQEQLEKTLDCQIYGACYSIEPLDLPQIIQRLHGLSAFSLHSYSPGETNRVASCLRKLGIPPLRVWRHRARSVRARLLSQGGRAATCGKYLFNWAVRTKLKLTPIPAASQLDLSSWFVAGYSGGDIYHSLSRARPRWFMWCLLLLSVGVGIYLLPNR

SEQ ID NO: 59 - protein, 591 aa, Artificial Sequence
  Synthetic peptide
SMSYTWTGALITPCAAEETKLPINALSNSLLRHHNLVYATTSRSASLRQKKVTFDRLQVLDDHYRDVLKEMKAKASTVKAKLLSVEEACKLTPPHSARSKFGYGAKDVRNLSSKAVNHIRSVWKDLLEDTETPIDTTIMAKNEVFCVQPEKGGRKPARLIVFPDLGVRVCEKMALYDVVSTLPQAVMGSSYGFQYSPGQRVEFLVNAWKAKKCPMGFAYDTRCFDSTVTENDIRVEESIYQCCDLAPEARQAIRSLTERLYIGGPLTNSKGQNCGYRRCRASGVLTTSCGNTLTCYLKAAAACRAAKLQDCTMLVCGDDLVVICESAGTQEDEASLRAFTEAMTRYSAPPGDPPKPEYDLELITSCSSNVSVAHDASGKRVYYLTRDPTTPLARAAWETARHTPVNSWLGNIIMYAPTLWARAILMTHFFSILLAQEQLEKTLDCQIYGACYSIEPLDLPQIIQRLHGLSAFSLHSYSPGETNRVVSCLRKLGIPPLRVWRHRARSVRARLLSQGGRAATCGKYLFNWAVRTKLKLTPIPAASQLDLSSWFVAGYSGGDIYHSLSRARPRWFMWCLLLLSVGVGIYLLPNR

SEQ ID NO: 60 - protein, 591 aa, Artificial Sequence
  Synthetic peptide
SMSYTWTGALITPCAAEETKLPINALSNSLLRHHNLVYATTSRSASLRQKKVTFDRLQVLDDHYRDVLKEMKAKASTVKAKLLSVEEACKLTPPHSARSKFGYGAKDVRNLSSKAVNHIRSVWKDLLEDTETPIDTTIMAKNEVFCVQPEKGGRKPARLIVFPDLGVRVCEKMALYDVVSTLPQAVMGSSYGFQYSPGQRVEFLVNAWKAKKCPMGFAYDTRCFDSTVTENDIRVEESIYQCCDLAPEARQAIRSLTERLYIGGPLTNSKGQNCGYRRCRASGVLTTSCGNTLTCYLKAAAACRAAKLQDCTMLVCGDDLVVICESAGTQEDEASLRAFTEAMTRYSAPPGDPPKPEYDLELITSCSSNVSVAHDASGKRVYYLTRDPTTPLARAAWETARHTPVNSWLGNIIMYAPTLWARAILMTHFFSILLAQEQLEKTLDCQIYGACYSIEPLDLPQIIQRLHGLSAFSLHSYSPGETNRVISCLRKLGIPPLRVWRHRARSVRARLLSQGGRAATCGKYLFNWAVRTKLKLTPIPAASQLDLSSWFVAGYSGGDIYHSLSRARPRWFMWCLLLLSVGVGIYLLPNR

SEQ ID NO: 61 - protein, 591 aa, Artificial Sequence
  Synthetic peptide
SMSYTWTGALITPCAAEETKLPINALSNSLLRHHNLVYATTSRSASLRQKKVTFDRLQVLDDHYRDVLKEMKAKASTVKAKLLSVEEACKLTPPHSARSKFGYGAKDVRNLSSKAVNHIRSVWKDLLEDTETPIDTTIMAKNEVFCVQPEKGGRKPARLIVFPDLGVRVCEKMALYDVVSTLPQAVMGSSYGFQYSPGQRVEFLVNAWKAKKCPMGFAYDTRCFDSTVTENDIRVEESIYQCCDLAPEARQAIRSLTERLYIGGPLTNSKGQNCGYRRCRASGVLTTSCGNTLTCYLKAAAACRAAKLQDCTMLVCGDDLVVICESAGTQEDEASLRAFTEAMTRYSAPPGDPPKPEYDLELITSCSSNVSVAHDASGKRVYYLTRDPTTPLARAAWETARHTPVNSWLGNIIMYAPTLWARAILMTHFFSILLAQEQLEKTLDCQIYGACYSIEPLDLPQIIQRLHGLSAFSLHSYSPGETNRVTSCLRKLGIPPLRVWRHRARSVRARLLSQGGRAATCGKYLFNWAVRTKLKLTPIPAASQLDLSSWFVAGYSGGDIYHSLSRARPRWFMWCLLLLSVGVGIYLLPNR

SEQ ID NO: 62 - protein, 591 aa, Artificial Sequence
  Synthetic peptide
SMSYTWTGALITPCAAEETKLPINALSNSLLRHHNLVYATTSRSASLRQKKVTFDRLQVLDDHYRDVLKEMKAKASTVKAKLLSVEEACKLTPPHSARSKFGYGAKDVRNLSSKAVNHIRSVWKDLLEDTETPIDTTIMAKNEVFCVQPEKGGRKPARLIVFPDLGVRVCEKMALYDVVSTLPQAVMGSSYGFQYSPGQRVEFLVNAWKAKKCPMGFAYDTRCFDSTVTENDIRVEESIYQCCDLAPEARQAIRSLTERLYIGGPLTNSKGQNCGYRRCRASGVLTTSCGNTLTCYLKAAAACRAAKLQDCTMLVCGDDLVVICESAGTQEDEASLRAFTEAMTRYSAPPGDPPKPEYDLELITSCSSNVSVAHDASGKRVYYLTRDPTTPLARAAWETARHTPVNSWLGNIIMYAPTLWARAILMTHFFSILLAQEQLEKTLDCQIYGACYSIEPLDLPQIIQRLHGLSAFSLHSYSPGETNRVSSCLRKLGIPPLRVWRHRARSVRARLLSQGGRAATCGKYLFNWAVRTKLKLTPIPAASQLDLSSWFVAGYSGGDIYHSLSRARPRWFMWCLLLLSVGVGIYLLPNR

SEQ ID NO: 63 - protein, 591 aa, Artificial Sequence
  Synthetic peptide
SMSYTWTGALITPCAAEETKLPINALSNSLLRHHNLVYATTSRSASLRQKKVTFDRLQVLDDHYRDVLKEMKAKASTVKAKLLSVEEACKLTPPHSARSKFGYGAKDVRNLSSKAVNHIRSVWKDLLEDTETPIDTTIMAKNEVFCVQPEKGGRKPARLIVFPDLGVRVCEKMALYDVVSTLPQAVMGSSYGFQYSPGQRVEFLVNAWKAKKCPMGFAYDTRCFDSTVTENDIRVEESIYQCCDLAPEARQAIRSLTERLYIGGPLTNSKGQNCGYRRCRASGVLTTSCGNTLTCYLKAAAACRAAKLQDCTMLVCGDDLVVICESAGTQEDEASLRAFTEAMTRYSAPPGDPPKPEYDLELITSCSSNVSVAHDASGKRVYYLTRDPTTPLARAAWETARHTPVNSWLGNIIMYAPTLWARMILMTHFFSILLAQEQLEKTLDCQIYGACYSIEPLDLPQIIQRLHGLSAFSLHSYSPGEVNRVASCLRKLGVPPLRVWRHRARSVRARLLSQGGRAATCGKYLFNWAVRTKLKLTPIPAASQLDLSSWFVAGYSGGDIYHSLSRARPRWFMWCLLLLSVGVGIYLLPNR

SEQ ID NO: 64 - protein, 591 aa, Artificial Sequence
  Synthetic peptide
SMSYTWTGALITPCAAEETKLPINALSNSLLRHHNLVYATTSRSASLRQKKVTFDRLQVLDDHYRDVLKEMKAKASTVKAKLLSVEEACKLTPPHSARSKFGYGAKDVRNLSSKAVNHIRSVWKDLLEDTETPIDTTIMAKNEVFCVQPEKGGRKPARLIVFPDLGVRVCEKMALYDVVSTLPQAVMGSSYGFQYSPGQRVEFLVNAWKAKKCPMGFAYDTRCFDSTVTENDIRVEESIYQCCDLAPEARQAIRSLTERLYIGGPLTNSKGQNCGYRRCRASGVLTTSCGNTLTCYLKAAAACRAAKLQDCTMLVCGDDLVVICESAGTQEDEASLRAFTEAMTRYSAPPGDPPKPEYDLELITSCSSNVSVAHDASGKRVYYLTRDPTTPLARAAWETARHTPVNSWLGNIIMYAPTLWARMILMTHFFSILLAQEQLEKTLDCQIYGACYSIEPLDLPQIIQRLHGLSAFSLHSYSPGEVNRVVSCLRKLGVPPLRVWRHRARSVRARLLSQGGRAATCGKYLFNWAVRTKLKLTPIPAASQLDLSSWFVAGYSGGDIYHSLSRARPRWFMWCLLLLSVGVGIYLLPNR

SEQ ID NO: 65 - protein, 591 aa, Artificial Sequence
  Synthetic peptide
SMSYTWTGALITPCAAEETKLPINALSNSLLRHHNLVYATTSRSASLRQKKVTFDRLQVLDDHYRDVLKEMKAKASTVKAKLLSVEEACKLTPPHSARSKFGYGAKDVRNLSSKAVNHIRSVWKDLLEDTETPIDTTIMAKNEVFCVQPEKGGRKPARLIVFPDLGVRVCEKMALYDVVSTLPQAVMGSSYGFQYSPGQRVEFLVNAWKAKKCPMGFAYDTRCFDSTVTENDIRVEESIYQCCDLAPEARQAIRSLTERLYIGGPLTNSKGQNCGYRRCRASGVLTTSCGNTLTCYLKAAAACRAAKLQDCTMLVCGDDLVVICESAGTQEDEASLRAFTEAMTRYSAPPGDPPKPEYDLELITSCSSNVSVAHDASGKRVYYLTRDPTTPLARAAWETARHTPVNSWLGNIIMYAPTLWARMILMTHFFSILLAQEQLEKTLDCQIYGACYSIEPLDLPQIIQRLHGLSAFSLHSYSPGEVNRVISCLRKLGVPPLRVWRHRARSVRARLLSQGGRAATCGKYLFNWAVRTKLKLTPIPAASQLDLSSWFVAGYSGGDIYHSLSRARPRWFMWCLLLLSVGVGIYLLPNR

SEQ ID NO: 66 - protein, 591 aa, Artificial Sequence
  Synthetic peptide
SMSYTWTGALITPCAAEETKLPINALSNSLLRHHNLVYATTSRSASLRQKKVTFDRLQVLDDHYRDVLKEMKAKASTVKAKLLSVEEACKLTPPHSARSKFGYGAKDVRNLSSKAVNHIRSVWKDLLEDTETPIDTTIMAKNEVFCVQPEKGGRKPARLIVFPDLGVRVCEKMALYDVVSTLPQAVMGSSYGFQYSPGQRVEFLVNAWKAKKCPMGFAYDTRCFDSTVTENDIRVEESIYQCCDLAPEARQAIRSLTERLYIGGPLTNSKGQNCGYRRCRASGVLTTSCGNTLTCYLKAAAACRAAKLQDCTMLVCGDDLVVICESAGTQEDEASLRAFTEAMTRYSAPPGDPPKPEYDLELITSCSSNVSVAHDASGKRVYYLTRDPTTPLARAAWETARHTPVNSWLGNIIMYAPTLWARMILMTHFFSILLAQEQLEKTLDCQIYGACYSIEPLDLPQIIQRLHGLSAFSLHSYSPGEVNRVTSCLRKLGVPPLRVWRHRARSVRARLLSQGGRAATCGKYLFNWAVRTKLKLTPIPAASQLDLSSWFVAGYSGGDIYHSLSRARPRWFMWCLLLLSVGVGIYLLPNR

SEQ ID NO: 67 - protein, 591 aa, Artificial Sequence
  Synthetic peptide
SMSYTWTGALITPCAAEETKLPINALSNSLLRHHNLVYATTSRSASLRQKKVTFDRLQVLDDHYRDVLKEMKAKASTVKAKLLSVEEACKLTPPHSARSKFGYGAKDVRNLSSKAVNHIRSVWKDLLEDTETPIDTTIMAKNEVFCVQPEKGGRKPARLIVFPDLGVRVCEKMALYDVVSTLPQAVMGSSYGFQYSPGQRVEFLVNAWKAKKCPMGFAYDTRCFDSTVTENDIRVEESIYQCCDLAPEARQAIRSLTERLYIGGPLTNSKGQNCGYRRCRASGVLTTSCGNTLTCYLKAAAACRAAKLQDCTMLVCGDDLVVICESAGTQEDEASLRAFTEAMTRYSAPPGDPPKPEYDLELITSCSSNVSVAHDASGKRVYYLTRDPTTPLARAAWETARHTPVNSWLGNIIMYAPTLWARMILMTHFFSILLAQEQLEKTLDCQIYGACYSIEPLDLPQIIQRLHGLSAFSLHSYSPGEVNRVSSCLRKLGVPPLRVWRHRARSVRARLLSQGGRAATCGKYLFNWAVRTKLKLTPIPAASQLDLSSWFVAGYSGGDIYHSLSRARPRWFMWCLLLLSVGVGIYLLPNR

SEQ ID NO: 68 - protein, 591 aa, Artificial Sequence
  Synthetic peptid
SMSYTWTGALITPCAAEETKLPINALSNSLLRHHNLVYATTSRSASLRQKKVTFDRLQVLDDHYRDVLKEMKAKASTVKAKLLSVEEACKLTPPHSARSKFGYGAKDVRNLSSKAVNHIRSVWKDLLEDTETPIDTTIMAKNEVFCVQPEKGGRKPARLIVFPDLGVRVCEKMALYDVVSTLPQAVMGSSYGFQYSPGQRVEFLVNAWKAKKCPMGFAYDTRCFDSTVTENDIRVEESIYQCCDLAPEARQAIRSLTERLYIGGPLTNSKGQNCGYRRCRASGVLTTSCGNTLTCYLKAAAACRAAKLQDCTMLVCGDDLVVICESAGTQEDEASLRAFTEAMTRYSAPPGDPPKPEYDLELITSCSSNVSVAHDASGKRVYYLTRDPTTPLARAAWETARHTPVNSWLGNIIMYAPTLWARMILMTHFFSILLAQEQLEKTLDCQIYGACYSIEPLDLPQIIQRLHGLSAFSLHSYSPGEVNRVASCLRKLGIPPLRVWRHRARSVRARLLSQGGRAATCGKYLFNWAVRTKLKLTPIPAASQLDLSSWFVAGYSGGDIYHSLSRARPRWFMWCLLLLSVGVGIYLLPNR

SEQ ID NO: 69 - protein, 591 aa, Artificial Sequence
  Synthetic peptide
SMSYTWTGALITPCAAEETKLPINALSNSLLRHHNLVYATTSRSASLRQKKVTFDRLQVLDDHYRDVLKEMKAKASTVKAKLLSVEEACKLTPPHSARSKFGYGAKDVRNLSSKAVNHIRSVWKDLLEDTETPIDTTIMAKNEVFCVQPEKGGRKPARLIVFPDLGVRVCEKMALYDVVSTLPQAVMGSSYGFQYSPGQRVEFLVNAWKAKKCPMGFAYDTRCFDSTVTENDIRVEESIYQCCDLAPEARQAIRSLTERLYIGGPLTNSKGQNCGYRRCRASGVLTTSCGNTLTCYLKAAAACRAAKLQDCTMLVCGDDLVVICESAGTQEDEASLRAFTEAMTRYSAPPGDPPKPEYDLELITSCSSNVSVAHDASGKRVYYLTRDPTTPLARAAWETARHTPVNSWLGNIIMYAPTLWARMILMTHFFSILLAQEQLEKTLDCQIYGACYSIEPLDLPQIIQRLHGLSAFSLHSYSPGEVNRVVSCLRKLGIPPLRVWRHRARSVRARLLSQGGRAATCGKYLFNWAVRTKLKLTPIPAASQLDLSSWFVAGYSGGDIYHSLSRARPRWFMWCLLLLSVGVGIYLLPNR

SEQ ID NO: 70 - protein, 591 aa, Artificial Sequence
  Synthetic peptide
SMSYTWTGALITPCAAEETKLPINALSNSLLRHHNLVYATTSRSASLRQKKVTFDRLQVLDDHYRDVLKEMKAKASTVKAKLLSVEEACKLTPPHSARSKFGYGAKDVRNLSSKAVNHIRSVWKDLLEDTETPIDTTIMAKNEVFCVQPEKGGRKPARLIVFPDLGVRVCEKMALYDVVSTLPQAVMGSSYGFQYSPGQRVEFLVNAWKAKKCPMGFAYDTRCFDSTVTENDIRVEESIYQCCDLAPEARQAIRSLTERLYIGGPLTNSKGQNCGYRRCRASGVLTTSCGNTLTCYLKAAAACRAAKLQDCTMLVCGDDLVVICESAGTQEDEASLRAFTEAMTRYSAPPGDPPKPEYDLELITSCSSNVSVAHDASGKRVYYLTRDPTTPLARAAWETARHTPVNSWLGNIIMYAPTLWARMILMTHFFSILLAQEQLEKTLDCQIYGACYSIEPLDLPQIIQRLHGLSAFSLHSYSPGEVNRVISCLRKLGIPPLRVWRHRARSVRARLLSQGGRAATCGKYLFNWAVRTKLKLTPIPAASQLDLSSWFVAGYSGGDIYHSLSRARPRWFMWCLLLLSVGVGIYLLPNR

SEQ ID NO: 71 - protein, 591 aa, Artificial Sequence
  Synthetic peptide
SMSYTWTGALITPCAAEETKLPINALSNSLLRHHNLVYATTSRSASLRQKKVTFDRLQVLDDHYRDVLKEMKAKASTVKAKLLSVEEACKLTPPHSARSKFGYGAKDVRNLSSKAVNHIRSVWKDLLEDTETPIDTTIMAKNEVFCVQPEKGGRKPARLIVFPDLGVRVCEKMALYDVVSTLPQAVMGSSYGFQYSPGQRVEFLVNAWKAKKCPMGFAYDTRCFDSTVTENDIRVEESIYQCCDLAPEARQAIRSLTERLYIGGPLTNSKGQNCGYRRCRASGVLTTSCGNTLTCYLKAAAACRAAKLQDCTMLVCGDDLVVICESAGTQEDEASLRAFTEAMTRYSAPPGDPPKPEYDLELITSCSSNVSVAHDASGKRVYYLTRDPTTPLARAAWETARHTPVNSWLGNIIMYAPTLWARMILMTHFFSILLAQEQLEKTLDCQIYGACYSIEPLDLPQIIQRLHGLSAFSLHSYSPGEVNRVTSCLRKLGIPPLRVWRHRARSVRARLLSQGGRAATCGKYLFNWAVRTKLKLTPIPAASQLDLSSWFVAGYSGGDIYHSLSRARPRWFMWCLLLLSVGVGIYLLPNR

SEQ ID NO: 72 - protein, 591 aa, Artificial Sequence
  Synthetic peptide
SMSYTWTGALITPCAAEETKLPINALSNSLLRHHNLVYATTSRSASLRQKKVTFDRLQVLDDHYRDVLKEMKAKASTVKAKLLSVEEACKLTPPHSARSKFGYGAKDVRNLSSKAVNHIRSVWKDLLEDTETPIDTTIMAKNEVFCVQPEKGGRKPARLIVFPDLGVRVCEKMALYDVVSTLPQAVMGSSYGFQYSPGQRVEFLVNAWKAKKCPMGFAYDTRCFDSTVTENDIRVEESIYQCCDLAPEARQAIRSLTERLYIGGPLTNSKGQNCGYRRCRASGVLTTSCGNTLTCYLKAAAACRAAKLQDCTMLVCGDDLVVICESAGTQEDEASLRAFTEAMTRYSAPPGDPPKPEYDLELITSCSSNVSVAHDASGKRVYYLTRDPTTPLARAAWETARHTPVNSWLGNIIMYAPTLWARMILMTHFFSILLAQEQLEKTLDCQIYGACYSIEPLDLPQIIQRLHGLSAFSLHSYSPGEVNRVSSCLRKLGIPPLRVWRHRARSVRARLLSQGGRAATCGKYLFNWAVRTKLKLTPIPAASQLDLSSWFVAGYSGGDIYHSLSRARPRWFMWCLLLLSVGVGIYLLPNR

SEQ ID NO: 73 - protein, 591 aa, Artificial Sequence
  Synthetic peptide
SMSYTWTGALITPCAAEETKLPINALSNSLLRHHNLVYATTSRSASLRQKKVTFDRLQVLDDHYRDVLKEMKAKASTVKAKLLSVEEACKLTPPHSARSKFGYGAKDVRNLSSKAVNHIRSVWKDLLEDTETPIDTTIMAKNEVFCVQPEKGGRKPARLIVFPDLGVRVCEKMALYDVVSTLPQAVMGSSYGFQYSPGQRVEFLVNAWKAKKCPMGFAYDTRCFDSTVTENDIRVEESIYQCCDLAPEARQAIRSLTERLYIGGPLTNSKGQNCGYRRCRASGVLTTSCGNTLTCYLKAAAACRAAKLQDCTMLVCGDDLVVICESAGTQEDEASLRAFTEAMTRYSAPPGDPPKPEYDLELITSCSSNVSVAHDASGKRVYYLTRDPTTPLARAAWETARHTPVNSWLGNIIMYAPTLWARAILMTHFFSILLAQEQLEKTLDCQIYGACYSIEPLDLPQIIQRLHGLSAFSLHSYSPGEVNRVASCLRKLGVPPLRVWRHRARSVRARLLSQGGRAATCGKYLFNWAVRTKLKLTPIPAASQLDLSSWFVAGYSGGDIYHSLSRARPRWFMWCLLLLSVGVGIYLLPNR

SEQ ID NO: 74 - protein, 591 aa, Artificial Sequence
  Synthetic peptide
SMSYTWTGALITPCAAEETKLPINALSNSLLRHHNLVYATTSRSASLRQKKVTFDRLQVLDDHYRDVLKEMKAKASTVKAKLLSVEEACKLTPPHSARSKFGYGAKDVRNLSSKAVNHIRSVWKDLLEDTETPIDTTIMAKNEVFCVQPEKGGRKPARLIVFPDLGVRVCEKMALYDVVSTLPQAVMGSSYGFQYSPGQRVEFLVNAWKAKKCPMGFAYDTRCFDSTVTENDIRVEESIYQCCDLAPEARQAIRSLTERLYIGGPLTNSKGQNCGYRRCRASGVLTTSCGNTLTCYLKAAAACRAAKLQDCTMLVCGDDLVVICESAGTQEDEASLRAFTEAMTRYSAPPGDPPKPEYDLELITSCSSNVSVAHDASGKRVYYLTRDPTTPLARAAWETARHTPVNSWLGNIIMYAPTLWARAILMTHFFSILLAQEQLEKTLDCQIYGACYSIEPLDLPQIIQRLHGLSAFSLHSYSPGEVNRVVSCLRKLGVPPLRVWRHRARSVRARLLSQGGRAATCGKYLFNWAVRTKLKLTPIPAASQLDLSSWFVAGYSGGDIYHSLSRARPRWFMWCLLLLSVGVGIYLLPNR

SEQ ID NO: 75 - protein, 591 aa, Artificial Sequence
  Synthetic peptide
SMSYTWTGALITPCAAEETKLPINALSNSLLRHHNLVYATTSRSASLRQKKVTFDRLQVLDDHYRDVLKEMKAKASTVKAKLLSVEEACKLTPPHSARSKFGYGAKDVRNLSSKAVNHIRSVWKDLLEDTETPIDTTIMAKNEVFCVQPEKGGRKPARLIVFPDLGVRVCEKMALYDVVSTLPQAVMGSSYGFQYSPGQRVEFLVNAWKAKKCPMGFAYDTRCFDSTVTENDIRVEESIYQCCDLAPEARQAIRSLTERLYIGGPLTNSKGQNCGYRRCRASGVLTTSCGNTLTCYLKAAAACRAAKLQDCTMLVCGDDLVVICESAGTQEDEASLRAFTEAMTRYSAPPGDPPKPEYDLELITSCSSNVSVAHDASGKRVYYLTRDPTTPLARAAWETARHTPVNSWLGNIIMYAPTLWARAILMTHFFSILLAQEQLEKTLDCQIYGACYSIEPLDLPQIIQRLHGLSAFSLHSYSPGEVNRVISCLRKLGVPPLRVWRHRARSVRARLLSQGGRAATCGKYLFNWAVRTKLKLTPIPAASQLDLSSWFVAGYSGGDIYHSLSRARPRWFMWCLLLLSVGVGIYLLPNR

SEQ ID NO: 76 - protein, 591 aa, Artificial Sequence
  Synthetic peptide
SMSYTWTGALITPCAAEETKLPINALSNSLLRHHNLVYATTSRSASLRQKKVTFDRLQVLDDHYRDVLKEMKAKASTVKAKLLSVEEACKLTPPHSARSKFGYGAKDVRNLSSKAVNHIRSVWKDLLEDTETPIDTTIMAKNEVFCVQPEKGGRKPARLIVFPDLGVRVCEKMALYDVVSTLPQAVMGSSYGFQYSPGQRVEFLVNAWKAKKCPMGFAYDTRCFDSTVTENDIRVEESIYQCCDLAPEARQAIRSLTERLYIGGPLTNSKGQNCGYRRCRASGVLTTSCGNTLTCYLKAAAACRAAKLQDCTMLVCGDDLVVICESAGTQEDEASLRAFTEAMTRYSAPPGDPPKPEYDLELITSCSSNVSVAHDASGKRVYYLTRDPTTPLARAAWETARHTPVNSWLGNIIMYAPTLWARAILMTHFFSILLAQEQLEKTLDCQIYGACYSIEPLDLPQIIQRLHGLSAFSLHSYSPGEVNRVTSCLRKLGVPPLRVWRHRARSVRARLLSQGGRAATCGKYLFNWAVRTKLKLTPIPAASQLDLSSWFVAGYSGGDIYHSLSRARPRWFMWCLLLLSVGVGIYLLPNR

SEQ ID NO: 77 - protein, 591 aa, Artificial Sequence
  Synthetic peptide
SMSYTWTGALITPCAAEETKLPINALSNSLLRHHNLVYATTSRSASLRQKKVTFDRLQVLDDHYRDVLKEMKAKASTVKAKLLSVEEACKLTPPHSARSKFGYGAKDVRNLSSKAVNHIRSVWKDLLEDTETPIDTTIMAKNEVFCVQPEKGGRKPARLIVFPDLGVRVCEKMALYDVVSTLPQAVMGSSYGFQYSPGQRVEFLVNAWKAKKCPMGFAYDTRCFDSTVTENDIRVEESIYQCCDLAPEARQAIRSLTERLYIGGPLTNSKGQNCGYRRCRASGVLTTSCGNTLTCYLKAAAACRAAKLQDCTMLVCGDDLVVICESAGTQEDEASLRAFTEAMTRYSAPPGDPPKPEYDLELITSCSSNVSVAHDASGKRVYYLTRDPTTPLARAAWETARHTPVNSWLGNIIMYAPTLWARAILMTHFFSILLAQEQLEKTLDCQIYGACYSIEPLDLPQIIQRLHGLSAFSLHSYSPGEVNRVSSCLRKLGVPPLRVWRHRARSVRARLLSQGGRAATCGKYLFNWAVRTKLKLTPIPAASQLDLSSWFVAGYSGGDIYHSLSRARPRWFMWCLLLLSVGVGIYLLPNR

SEQ ID NO: 78 - protein, 591 aa, Artificial Sequence
  Synthetic peptid
SMSYTWTGALITPCAAEETKLPINALSNSLLRHHNLVYATTSRSASLRQKKVTFDRLQVLDDHYRDVLKEMKAKASTVKAKLLSVEEACKLTPPHSARSKFGYGAKDVRNLSSKAVNHIRSVWKDLLEDTETPIDTTIMAKNEVFCVQPEKGGRKPARLIVFPDLGVRVCEKMALYDVVSTLPQAVMGSSYGFQYSPGQRVEFLVNAWKAKKCPMGFAYDTRCFDSTVTENDIRVEESIYQCCDLAPEARQAIRSLTERLYIGGPLTNSKGQNCGYRRCRASGVLTTSCGNTLTCYLKAAAACRAAKLQDCTMLVCGDDLVVICESAGTQEDEASLRAFTEAMTRYSAPPGDPPKPEYDLELITSCSSNVSVAHDASGKRVYYLTRDPTTPLARAAWETARHTPVNSWLGNIIMYAPTLWARAILMTHFFSILLAQEQLEKTLDCQIYGACYSIEPLDLPQIIQRLHGLSAFSLHSYSPGEVNRVASCLRKLGIPPLRVWRHRARSVRARLLSQGGRAATCGKYLFNWAVRTKLKLTPIPAASQLDLSSWFVAGYSGGDIYHSLSRARPRWFMWCLLLLSVGVGIYLLPNR

SEQ ID NO: 79 - protein, 591 aa, Artificial Sequence
  Synthetic peptide
SMSYTWTGALITPCAAEETKLPINALSNSLLRHHNLVYATTSRSASLRQKKVTFDRLQVLDDHYRDVLKEMKAKASTVKAKLLSVEEACKLTPPHSARSKFGYGAKDVRNLSSKAVNHIRSVWKDLLEDTETPIDTTIMAKNEVFCVQPEKGGRKPARLIVFPDLGVRVCEKMALYDVVSTLPQAVMGSSYGFQYSPGQRVEFLVNAWKAKKCPMGFAYDTRCFDSTVTENDIRVEESIYQCCDLAPEARQAIRSLTERLYIGGPLTNSKGQNCGYRRCRASGVLTTSCGNTLTCYLKAAAACRAAKLQDCTMLVCGDDLVVICESAGTQEDEASLRAFTEAMTRYSAPPGDPPKPEYDLELITSCSSNVSVAHDASGKRVYYLTRDPTTPLARAAWETARHTPVNSWLGNIIMYAPTLWARAILMTHFFSILLAQEQLEKTLDCQIYGACYSIEPLDLPQIIQRLHGLSAFSLHSYSPGEVNRVVSCLRKLGIPPLRVWRHRARSVRARLLSQGGRAATCGKYLFNWAVRTKLKLTPIPAASQLDLSSWFVAGYSGGDIYHSLSRARPRWFMWCLLLLSVGVGIYLLPNR

SEQ ID NO: 80 - protein, 591 aa, Artificial Sequence
  Synthetic peptide
SMSYTWTGALITPCAAEETKLPINALSNSLLRHHNLVYATTSRSASLRQKKVTFDRLQVLDDHYRDVLKEMKAKASTVKAKLLSVEEACKLTPPHSARSKFGYGAKDVRNLSSKAVNHIRSVWKDLLEDTETPIDTTIMAKNEVFCVQPEKGGRKPARLIVFPDLGVRVCEKMALYDVVSTLPQAVMGSSYGFQYSPGQRVEFLVNAWKAKKCPMGFAYDTRCFDSTVTENDIRVEESIYQCCDLAPEARQAIRSLTERLYIGGPLTNSKGQNCGYRRCRASGVLTTSCGNTLTCYLKAAAACRAAKLQDCTMLVCGDDLVVICESAGTQEDEASLRAFTEAMTRYSAPPGDPPKPEYDLELITSCSSNVSVAHDASGKRVYYLTRDPTTPLARAAWETARHTPVNSWLGNIIMYAPTLWARAILMTHFFSILLAQEQLEKTLDCQIYGACYSIEPLDLPQIIQRLHGLSAFSLHSYSPGEVNRVISCLRKLGIPPLRVWRHRARSVRARLLSQGGRAATCGKYLFNWAVRTKLKLTPIPAASQLDLSSWFVAGYSGGDIYHSLSRARPRWFMWCLLLLSVGVGIYLLPNR

SEQ ID NO: 81 - protein, 591 aa, Artificial Sequence
  Synthetic peptide
SMSYTWTGALITPCAAEETKLPINALSNSLLRHHNLVYATTSRSASLRQKKVTFDRLQVLDDHYRDVLKEMKAKASTVKAKLLSVEEACKLTPPHSARSKFGYGAKDVRNLSSKAVNHIRSVWKDLLEDTETPIDTTIMAKNEVFCVQPEKGGRKPARLIVFPDLGVRVCEKMALYDVVSTLPQAVMGSSYGFQYSPGQRVEFLVNAWKAKKCPMGFAYDTRCFDSTVTENDIRVEESIYQCCDLAPEARQAIRSLTERLYIGGPLTNSKGQNCGYRRCRASGVLTTSCGNTLTCYLKAAAACRAAKLQDCTMLVCGDDLVVICESAGTQEDEASLRAFTEAMTRYSAPPGDPPKPEYDLELITSCSSNVSVAHDASGKRVYYLTRDPTTPLARAAWETARHTPVNSWLGNIIMYAPTLWARAILMTHFFSILLAQEQLEKTLDCQIYGACYSIEPLDLPQIIQRLHGLSAFSLHSYSPGEVNRVTSCLRKLGIPPLRVWRHRARSVRARLLSQGGRAATCGKYLFNWAVRTKLKLTPIPAASQLDLSSWFVAGYSGGDIYHSLSRARPRWFMWCLLLLSVGVGIYLLPNR

SEQ ID NO: 82 - protein, 591 aa, Artificial Sequence
  Synthetic peptide
SMSYTWTGALITPCAAEETKLPINALSNSLLRHHNLVYATTSRSASLRQKKVTFDRLQVLDDHYRDVLKEMKAKASTVKAKLLSVEEACKLTPPHSARSKFGYGAKDVRNLSSKAVNHIRSVWKDLLEDTETPIDTTIMAKNEVFCVQPEKGGRKPARLIVFPDLGVRVCEKMALYDVVSTLPQAVMGSSYGFQYSPGQRVEFLVNAWKAKKCPMGFAYDTRCFDSTVTENDIRVEESIYQCCDLAPEARQAIRSLTERLYIGGPLTNSKGQNCGYRRCRASGVLTTSCGNTLTCYLKAAAACRAAKLQDCTMLVCGDDLVVICESAGTQEDEASLRAFTEAMTRYSAPPGDPPKPEYDLELITSCSSNVSVAHDASGKRVYYLTRDPTTPLARAAWETARHTPVNSWLGNIIMYAPTLWARAILMTHFFSILLAQEQLEKTLDCQIYGACYSIEPLDLPQIIQRLHGLSAFSLHSYSPGEVNRVSSCLRKLGIPPLRVWRHRARSVRARLLSQGGRAATCGKYLFNWAVRTKLKLTPIPAASQLDLSSWFVAGYSGGDIYHSLSRARPRWFMWCLLLLSVGVGIYLLPNR

SEQ ID NO: 83 - protein, 591 aa, Artificial Sequence
  Synthetic peptide
SMSYTWTGALITPCAAEETKLPINALSNSLLRHHNLVYATTSRSASLRQKKVTFDRLQVLDDHYRDVLKEMKAKASTVKAKLLSVEEACKLTPPHSARSKFGYGAKDVRNLSSKAVNHIRSVWKDLLEDTETPIDTTIMAKNEVFCVQPEKGGRKPARLIVFPDLGVRVCEKMALYDVVSTLPQAVMGSSYGFQYSPGQRVEFLVNAWKAKKCPMGFAYDTRCFDSTVTENDIRVEESIYQCCDLAPEARQAIRSLTERLYIGGPLTNSKGQNCGYRRCRASGVLTTSCGNTLTCYLKAAAACRAAKLQDCTMLVCGDDLVVICESAGTQEDEASLRAFTEAMTRYSAPPGDPPKPEYDLELITSCSSNVSVAHDASGKRVYYLTRDPTTPLARAAWETARHTPVNSWLGNIIMYAPTLWARMILMTHFFSILLAQEQLEKTLDCQIYGACYSIEPLDLPQIIQRLHGLSAFSLHSYSPGEDNRVASCLRKLGVPPLRVWRHRARSVRARLLSQGGRAATCGKYLFNWAVRTKLKLTPIPAASQLDLSSWFVAGYSGGDIYHSLSRARPRWFMWCLLLLSVGVGIYLLPNR

SEQ ID NO: 84 - protein, 591 aa, Artificial Sequence
  Synthetic peptide
SMSYTWTGALITPCAAEETKLPINALSNSLLRHHNLVYATTSRSASLRQKKVTFDRLQVLDDHYRDVLKEMKAKASTVKAKLLSVEEACKLTPPHSARSKFGYGAKDVRNLSSKAVNHIRSVWKDLLEDTETPIDTTIMAKNEVFCVQPEKGGRKPARLIVFPDLGVRVCEKMALYDVVSTLPQAVMGSSYGFQYSPGQRVEFLVNAWKAKKCPMGFAYDTRCFDSTVTENDIRVEESIYQCCDLAPEARQAIRSLTERLYIGGPLTNSKGQNCGYRRCRASGVLTTSCGNTLTCYLKAAAACRAAKLQDCTMLVCGDDLVVICESAGTQEDEASLRAFTEAMTRYSAPPGDPPKPEYDLELITSCSSNVSVAHDASGKRVYYLTRDPTTPLARAAWETARHTPVNSWLGNIIMYAPTLWARMILMTHFFSILLAQEQLEKTLDCQIYGACYSIEPLDLPQIIQRLHGLSAFSLHSYSPGEDNRVVSCLRKLGVPPLRVWRHRARSVRARLLSQGGRAATCGKYLFNWAVRTKLKLTPIPAASQLDLSSWFVAGYSGGDIYHSLSRARPRWFMWCLLLLSVGVGIYLLPNR

SEQ ID NO: 85 - protein, 591 aa, Artificial Sequence
  Synthetic peptide
SMSYTWTGALITPCAAEETKLPINALSNSLLRHHNLVYATTSRSASLRQKKVTFDRLQVLDDHYRDVLKEMKAKASTVKAKLLSVEEACKLTPPHSARSKFGYGAKDVRNLSSKAVNHIRSVWKDLLEDTETPIDTTIMAKNEVFCVQPEKGGRKPARLIVFPDLGVRVCEKMALYDVVSTLPQAVMGSSYGFQYSPGQRVEFLVNAWKAKKCPMGFAYDTRCFDSTVTENDIRVEESIYQCCDLAPEARQAIRSLTERLYIGGPLTNSKGQNCGYRRCRASGVLTTSCGNTLTCYLKAAAACRAAKLQDCTMLVCGDDLVVICESAGTQEDEASLRAFTEAMTRYSAPPGDPPKPEYDLELITSCSSNVSVAHDASGKRVYYLTRDPTTPLARAAWETARHTPVNSWLGNIIMYAPTLWARMILMTHFFSILLAQEQLEKTLDCQIYGACYSIEPLDLPQIIQRLHGLSAFSLHSYSPGEDNRVISCLRKLGVPPLRVWRHRARSVRARLLSQGGRAATCGKYLFNWAVRTKLKLTPIPAASQLDLSSWFVAGYSGGDIYHSLSRARPRWFMWCLLLLSVGVGIYLLPNR

SEQ ID NO: 86 - protein, 591 aa, Artificial Sequence
  Synthetic peptide
SMSYTWTGALITPCAAEETKLPINALSNSLLRHHNLVYATTSRSASLRQKKVTFDRLQVLDDHYRDVLKEMKAKASTVKAKLLSVEEACKLTPPHSARSKFGYGAKDVRNLSSKAVNHIRSVWKDLLEDTETPIDTTIMAKNEVFCVQPEKGGRKPARLIVFPDLGVRVCEKMALYDVVSTLPQAVMGSSYGFQYSPGQRVEFLVNAWKAKKCPMGFAYDTRCFDSTVTENDIRVEESIYQCCDLAPEARQAIRSLTERLYIGGPLTNSKGQNCGYRRCRASGVLTTSCGNTLTCYLKAAAACRAAKLQDCTMLVCGDDLVVICESAGTQEDEASLRAFTEAMTRYSAPPGDPPKPEYDLELITSCSSNVSVAHDASGKRVYYLTRDPTTPLARAAWETARHTPVNSWLGNIIMYAPTLWARMILMTHFFSILLAQEQLEKTLDCQIYGACYSIEPLDLPQIIQRLHGLSAFSLHSYSPGEDNRVTSCLRKLGVPPLRVWRHRARSVRARLLSQGGRAATCGKYLFNWAVRTKLKLTPIPAASQLDLSSWFVAGYSGGDIYHSLSRARPRWFMWCLLLLSVGVGIYLLPNR

SEQ ID NO: 87 - protein, 591 aa, Artificial Sequence
  Synthetic peptide
SMSYTWTGALITPCAAEETKLPINALSNSLLRHHNLVYATTSRSASLRQKKVTFDRLQVLDDHYRDVLKEMKAKASTVKAKLLSVEEACKLTPPHSARSKFGYGAKDVRNLSSKAVNHIRSVWKDLLEDTETPIDTTIMAKNEVFCVQPEKGGRKPARLIVFPDLGVRVCEKMALYDVVSTLPQAVMGSSYGFQYSPGQRVEFLVNAWKAKKCPMGFAYDTRCFDSTVTENDIRVEESIYQCCDLAPEARQAIRSLTERLYIGGPLTNSKGQNCGYRRCRASGVLTTSCGNTLTCYLKAAAACRAAKLQDCTMLVCGDDLVVICESAGTQEDEASLRAFTEAMTRYSAPPGDPPKPEYDLELITSCSSNVSVAHDASGKRVYYLTRDPTTPLARAAWETARHTPVNSWLGNIIMYAPTLWARMILMTHFFSILLAQEQLEKTLDCQIYGACYSIEPLDLPQIIQRLHGLSAFSLHSYSPGEDNRVSSCLRKLGVPPLRVWRHRARSVRARLLSQGGRAATCGKYLFNWAVRTKLKLTPIPAASQLDLSSWFVAGYSGGDIYHSLSRARPRWFMWCLLLLSVGVGIYLLPNR

SEQ ID NO: 88 - protein, 591 aa, Artificial Sequence
  Synthetic peptid
SMSYTWTGALITPCAAEETKLPINALSNSLLRHHNLVYATTSRSASLRQKKVTFDRLQVLDDHYRDVLKEMKAKASTVKAKLLSVEEACKLTPPHSARSKFGYGAKDVRNLSSKAVNHIRSVWKDLLEDTETPIDTTIMAKNEVFCVQPEKGGRKPARLIVFPDLGVRVCEKMALYDVVSTLPQAVMGSSYGFQYSPGQRVEFLVNAWKAKKCPMGFAYDTRCFDSTVTENDIRVEESIYQCCDLAPEARQAIRSLTERLYIGGPLTNSKGQNCGYRRCRASGVLTTSCGNTLTCYLKAAAACRAAKLQDCTMLVCGDDLVVICESAGTQEDEASLRAFTEAMTRYSAPPGDPPKPEYDLELITSCSSNVSVAHDASGKRVYYLTRDPTTPLARAAWETARHTPVNSWLGNIIMYAPTLWARMILMTHFFSILLAQEQLEKTLDCQIYGACYSIEPLDLPQIIQRLHGLSAFSLHSYSPGEDNRVASCLRKLGIPPLRVWRHRARSVRARLLSQGGRAATCGKYLFNWAVRTKLKLTPIPAASQLDLSSWFVAGYSGGDIYHSLSRARPRWFMWCLLLLSVGVGIYLLPNR

SEQ ID NO: 89 - protein, 591 aa, Artificial Sequence
  Synthetic peptide
SMSYTWTGALITPCAAEETKLPINALSNSLLRHHNLVYATTSRSASLRQKKVTFDRLQVLDDHYRDVLKEMKAKASTVKAKLLSVEEACKLTPPHSARSKFGYGAKDVRNLSSKAVNHIRSVWKDLLEDTETPIDTTIMAKNEVFCVQPEKGGRKPARLIVFPDLGVRVCEKMALYDVVSTLPQAVMGSSYGFQYSPGQRVEFLVNAWKAKKCPMGFAYDTRCFDSTVTENDIRVEESIYQCCDLAPEARQAIRSLTERLYIGGPLTNSKGQNCGYRRCRASGVLTTSCGNTLTCYLKAAAACRAAKLQDCTMLVCGDDLVVICESAGTQEDEASLRAFTEAMTRYSAPPGDPPKPEYDLELITSCSSNVSVAHDASGKRVYYLTRDPTTPLARAAWETARHTPVNSWLGNIIMYAPTLWARMILMTHFFSILLAQEQLEKTLDCQIYGACYSIEPLDLPQIIQRLHGLSAFSLHSYSPGEDNRVVSCLRKLGIPPLRVWRHRARSVRARLLSQGGRAATCGKYLFNWAVRTKLKLTPIPAASQLDLSSWFVAGYSGGDIYHSLSRARPRWFMWCLLLLSVGVGIYLLPNR

SEQ ID NO: 90 - protein, 591 aa, Artificial Sequence
  Synthetic peptide
SMSYTWTGALITPCAAEETKLPINALSNSLLRHHNLVYATTSRSASLRQKKVTFDRLQVLDDHYRDVLKEMKAKASTVKAKLLSVEEACKLTPPHSARSKFGYGAKDVRNLSSKAVNHIRSVWKDLLEDTETPIDTTIMAKNEVFCVQPEKGGRKPARLIVFPDLGVRVCEKMALYDVVSTLPQAVMGSSYGFQYSPGQRVEFLVNAWKAKKCPMGFAYDTRCFDSTVTENDIRVEESIYQCCDLAPEARQAIRSLTERLYIGGPLTNSKGQNCGYRRCRASGVLTTSCGNTLTCYLKAAAACRAAKLQDCTMLVCGDDLVVICESAGTQEDEASLRAFTEAMTRYSAPPGDPPKPEYDLELITSCSSNVSVAHDASGKRVYYLTRDPTTPLARAAWETARHTPVNSWLGNIIMYAPTLWARMILMTHFFSILLAQEQLEKTLDCQIYGACYSIEPLDLPQIIQRLHGLSAFSLHSYSPGEDNRVISCLRKLGIPPLRVWRHRARSVRARLLSQGGRAATCGKYLFNWAVRTKLKLTPIPAASQLDLSSWFVAGYSGGDIYHSLSRARPRWFMWCLLLLSVGVGIYLLPNR

SEQ ID NO: 91 - protein, 591 aa, Artificial Sequence
  Synthetic peptide
SMSYTWTGALITPCAAEETKLPINALSNSLLRHHNLVYATTSRSASLRQKKVTFDRLQVLDDHYRDVLKEMKAKASTVKAKLLSVEEACKLTPPHSARSKFGYGAKDVRNLSSKAVNHIRSVWKDLLEDTETPIDTTIMAKNEVFCVQPEKGGRKPARLIVFPDLGVRVCEKMALYDVVSTLPQAVMGSSYGFQYSPGQRVEFLVNAWKAKKCPMGFAYDTRCFDSTVTENDIRVEESIYQCCDLAPEARQAIRSLTERLYIGGPLTNSKGQNCGYRRCRASGVLTTSCGNTLTCYLKAAAACRAAKLQDCTMLVCGDDLVVICESAGTQEDEASLRAFTEAMTRYSAPPGDPPKPEYDLELITSCSSNVSVAHDASGKRVYYLTRDPTTPLARAAWETARHTPVNSWLGNIIMYAPTLWARMILMTHFFSILLAQEQLEKTLDCQIYGACYSIEPLDLPQIIQRLHGLSAFSLHSYSPGEDNRVTSCLRKLGIPPLRVWRHRARSVRARLLSQGGRAATCGKYLFNWAVRTKLKLTPIPAASQLDLSSWFVAGYSGGDIYHSLSRARPRWFMWCLLLLSVGVGIYLLPNR

SEQ ID NO: 92 - protein, 591 aa, Artificial Sequence
  Synthetic peptide
SMSYTWTGALITPCAAEETKLPINALSNSLLRHHNLVYATTSRSASLRQKKVTFDRLQVLDDHYRDVLKEMKAKASTVKAKLLSVEEACKLTPPHSARSKFGYGAKDVRNLSSKAVNHIRSVWKDLLEDTETPIDTTIMAKNEVFCVQPEKGGRKPARLIVFPDLGVRVCEKMALYDVVSTLPQAVMGSSYGFQYSPGQRVEFLVNAWKAKKCPMGFAYDTRCFDSTVTENDIRVEESIYQCCDLAPEARQAIRSLTERLYIGGPLTNSKGQNCGYRRCRASGVLTTSCGNTLTCYLKAAAACRAAKLQDCTMLVCGDDLVVICESAGTQEDEASLRAFTEAMTRYSAPPGDPPKPEYDLELITSCSSNVSVAHDASGKRVYYLTRDPTTPLARAAWETARHTPVNSWLGNIIMYAPTLWARMILMTHFFSILLAQEQLEKTLDCQIYGACYSIEPLDLPQIIQRLHGLSAFSLHSYSPGEDNRVSSCLRKLGIPPLRVWRHRARSVRARLLSQGGRAATCGKYLFNWAVRTKLKLTPIPAASQLDLSSWFVAGYSGGDIYHSLSRARPRWFMWCLLLLSVGVGIYLLPNR

SEQ ID NO: 93 - protein, 591 aa, Artificial Sequence
  Sythetic peptide
SMSYTWTGALITPCAAEETKLPINALSNSLLRHHNLVYATTSRSASLRQKKVTFDRLQVLDDHYRDVLKEMKAKASTVKAKLLSVEEACKLTPPHSARSKFGYGAKDVRNLSSKAVNHIRSVWKDLLEDTETPIDTTIMAKNEVFCVQPEKGGRKPARLIVFPDLGVRVCEKMALYDVVSTLPQAVMGSSYGFQYSPGQRVEFLVNAWKAKKCPMGFAYDTRCFDSTVTENDIRVEESIYQCCDLAPEARQAIRSLTERLYIGGPLTNSKGQNCGYRRCRASGVLTTSCGNTLTCYLKAAAACRAAKLQDCTMLVCGDDLVVICESAGTQEDEASLRAFTEAMTRYSAPPGDPPKPEYDLELITSCSSNVSVAHDASGKRVYYLTRDPTTPLARAAWETARHTPVNSWLGNIIMYAPTLWARAILMTHFFSILLAQEQLEKTLDCQIYGACYSIEPLDLPQIIQRLHGLSAFSLHSYSPGEDNRVASCLRKLGVPPLRVWRHRARSVRARLLSQGGRAATCGKYLFNWAVRTKLKLTPIPAASQLDLSSWFVAGYSGGDIYHSLSRARPRWFMWCLLLLSVGVGIYLLPNR

SEQ ID NO: 94 - protein, 591 aa, Artificial Sequence
  Synthetic peptide
SMSYTWTGALITPCAAEETKLPINALSNSLLRHHNLVYATTSRSASLRQKKVTFDRLQVLDDHYRDVLKEMKAKASTVKAKLLSVEEACKLTPPHSARSKFGYGAKDVRNLSSKAVNHIRSVWKDLLEDTETPIDTTIMAKNEVFCVQPEKGGRKPARLIVFPDLGVRVCEKMALYDVVSTLPQAVMGSSYGFQYSPGQRVEFLVNAWKAKKCPMGFAYDTRCFDSTVTENDIRVEESIYQCCDLAPEARQAIRSLTERLYIGGPLTNSKGQNCGYRRCRASGVLTTSCGNTLTCYLKAAAACRAAKLQDCTMLVCGDDLVVICESAGTQEDEASLRAFTEAMTRYSAPPGDPPKPEYDLELITSCSSNVSVAHDASGKRVYYLTRDPTTPLARAAWETARHTPVNSWLGNIIMYAPTLWARAILMTHFFSILLAQEQLEKTLDCQIYGACYSIEPLDLPQIIQRLHGLSAFSLHSYSPGEDNRVVSCLRKLGVPPLRVWRHRARSVRARLLSQGGRAATCGKYLFNWAVRTKLKLTPIPAASQLDLSSWFVAGYSGGDIYHSLSRARPRWFMWCLLLLSVGVGIYLLPNR

SEQ ID NO: 95 - protein, 591 aa, Artificial Sequence
  Synthetic peptide
SMSYTWTGALITPCAAEETKLPINALSNSLLRHHNLVYATTSRSASLRQKKVTFDRLQVLDDHYRDVLKEMKAKASTVKAKLLSVEEACKLTPPHSARSKFGYGAKDVRNLSSKAVNHIRSVWKDLLEDTETPIDTTIMAKNEVFCVQPEKGGRKPARLIVFPDLGVRVCEKMALYDVVSTLPQAVMGSSYGFQYSPGQRVEFLVNAWKAKKCPMGFAYDTRCFDSTVTENDIRVEESIYQCCDLAPEARQAIRSLTERLYIGGPLTNSKGQNCGYRRCRASGVLTTSCGNTLTCYLKAAAACRAAKLQDCTMLVCGDDLVVICESAGTQEDEASLRAFTEAMTRYSAPPGDPPKPEYDLELITSCSSNVSVAHDASGKRVYYLTRDPTTPLARAAWETARHTPVNSWLGNIIMYAPTLWARAILMTHFFSILLAQEQLEKTLDCQIYGACYSIEPLDLPQIIQRLHGLSAFSLHSYSPGEDNRVISCLRKLGVPPLRVWRHRARSVRARLLSQGGRAATCGKYLFNWAVRTKLKLTPIPAASQLDLSSWFVAGYSGGDIYHSLSRARPRWFMWCLLLLSVGVGIYLLPNR

SEQ ID NO: 96 - protein, 591 aa, Artificial Sequence
  Synthetic peptide
SMSYTWTGALITPCAAEETKLPINALSNSLLRHHNLVYATTSRSASLRQKKVTFDRLQVLDDHYRDVLKEMKAKASTVKAKLLSVEEACKLTPPHSARSKFGYGAKDVRNLSSKAVNHIRSVWKDLLEDTETPIDTTIMAKNEVFCVQPEKGGRKPARLIVFPDLGVRVCEKMALYDVVSTLPQAVMGSSYGFQYSPGQRVEFLVNAWKAKKCPMGFAYDTRCFDSTVTENDIRVEESIYQCCDLAPEARQAIRSLTERLYIGGPLTNSKGQNCGYRRCRASGVLTTSCGNTLTCYLKAAAACRAAKLQDCTMLVCGDDLVVICESAGTQEDEASLRAFTEAMTRYSAPPGDPPKPEYDLELITSCSSNVSVAHDASGKRVYYLTRDPTTPLARAAWETARHTPVNSWLGNIIMYAPTLWARAILMTHFFSILLAQEQLEKTLDCQIYGACYSIEPLDLPQIIQRLHGLSAFSLHSYSPGEDNRVTSCLRKLGVPPLRVWRHRARSVRARLLSQGGRAATCGKYLFNWAVRTKLKLTPIPAASQLDLSSWFVAGYSGGDIYHSLSRARPRWFMWCLLLLSVGVGIYLLPNR

SEQ ID NO: 97 - protein, 591 aa, Artificial Sequence
  Synthetic peptide
SMSYTWTGALITPCAAEETKLPINALSNSLLRHHNLVYATTSRSASLRQKKVTFDRLQVLDDHYRDVLKEMKAKASTVKAKLLSVEEACKLTPPHSARSKFGYGAKDVRNLSSKAVNHIRSVWKDLLEDTETPIDTTIMAKNEVFCVQPEKGGRKPARLIVFPDLGVRVCEKMALYDVVSTLPQAVMGSSYGFQYSPGQRVEFLVNAWKAKKCPMGFAYDTRCFDSTVTENDIRVEESIYQCCDLAPEARQAIRSLTERLYIGGPLTNSKGQNCGYRRCRASGVLTTSCGNTLTCYLKAAAACRAAKLQDCTMLVCGDDLVVICESAGTQEDEASLRAFTEAMTRYSAPPGDPPKPEYDLELITSCSSNVSVAHDASGKRVYYLTRDPTTPLARAAWETARHTPVNSWLGNIIMYAPTLWARAILMTHFFSILLAQEQLEKTLDCQIYGACYSIEPLDLPQIIQRLHGLSAFSLHSYSPGEDNRVSSCLRKLGVPPLRVWRHRARSVRARLLSQGGRAATCGKYLFNWAVRTKLKLTPIPAASQLDLSSWFVAGYSGGDIYHSLSRARPRWFMWCLLLLSVGVGIYLLPNR

SEQ ID NO: 98 - protein, 591 aa, Artificial Sequence
  Synthetic peptid
SMSYTWTGALITPCAAEETKLPINALSNSLLRHHNLVYATTSRSASLRQKKVTFDRLQVLDDHYRDVLKEMKAKASTVKAKLLSVEEACKLTPPHSARSKFGYGAKDVRNLSSKAVNHIRSVWKDLLEDTETPIDTTIMAKNEVFCVQPEKGGRKPARLIVFPDLGVRVCEKMALYDVVSTLPQAVMGSSYGFQYSPGQRVEFLVNAWKAKKCPMGFAYDTRCFDSTVTENDIRVEESIYQCCDLAPEARQAIRSLTERLYIGGPLTNSKGQNCGYRRCRASGVLTTSCGNTLTCYLKAAAACRAAKLQDCTMLVCGDDLVVICESAGTQEDEASLRAFTEAMTRYSAPPGDPPKPEYDLELITSCSSNVSVAHDASGKRVYYLTRDPTTPLARAAWETARHTPVNSWLGNIIMYAPTLWARAILMTHFFSILLAQEQLEKTLDCQIYGACYSIEPLDLPQIIQRLHGLSAFSLHSYSPGEDNRVASCLRKLGIPPLRVWRHRARSVRARLLSQGGRAATCGKYLFNWAVRTKLKLTPIPAASQLDLSSWFVAGYSGGDIYHSLSRARPRWFMWCLLLLSVGVGIYLLPNR

SEQ ID NO: 99 - protein, 591 aa, Artificial Sequence
  Synthetic peptide
SMSYTWTGALITPCAAEETKLPINALSNSLLRHHNLVYATTSRSASLRQKKVTFDRLQVLDDHYRDVLKEMKAKASTVKAKLLSVEEACKLTPPHSARSKFGYGAKDVRNLSSKAVNHIRSVWKDLLEDTETPIDTTIMAKNEVFCVQPEKGGRKPARLIVFPDLGVRVCEKMALYDVVSTLPQAVMGSSYGFQYSPGQRVEFLVNAWKAKKCPMGFAYDTRCFDSTVTENDIRVEESIYQCCDLAPEARQAIRSLTERLYIGGPLTNSKGQNCGYRRCRASGVLTTSCGNTLTCYLKAAAACRAAKLQDCTMLVCGDDLVVICESAGTQEDEASLRAFTEAMTRYSAPPGDPPKPEYDLELITSCSSNVSVAHDASGKRVYYLTRDPTTPLARAAWETARHTPVNSWLGNIIMYAPTLWARAILMTHFFSILLAQEQLEKTLDCQIYGACYSIEPLDLPQIIQRLHGLSAFSLHSYSPGEDNRVVSCLRKLGIPPLRVWRHRARSVRARLLSQGGRAATCGKYLFNWAVRTKLKLTPIPAASQLDLSSWFVAGYSGGDIYHSLSRARPRWFMWCLLLLSVGVGIYLLPNR

SEQ ID NO: 100 - protein, 591 aa, Artificial Sequence
  Synthetic peptide
SMSYTWTGALITPCAAEETKLPINALSNSLLRHHNLVYATTSRSASLRQKKVTFDRLQVLDDHYRDVLKEMKAKASTVKAKLLSVEEACKLTPPHSARSKFGYGAKDVRNLSSKAVNHIRSVWKDLLEDTETPIDTTIMAKNEVFCVQPEKGGRKPARLIVFPDLGVRVCEKMALYDVVSTLPQAVMGSSYGFQYSPGQRVEFLVNAWKAKKCPMGFAYDTRCFDSTVTENDIRVEESIYQCCDLAPEARQAIRSLTERLYIGGPLTNSKGQNCGYRRCRASGVLTTSCGNTLTCYLKAAAACRAAKLQDCTMLVCGDDLVVICESAGTQEDEASLRAFTEAMTRYSAPPGDPPKPEYDLELITSCSSNVSVAHDASGKRVYYLTRDPTTPLARAAWETARHTPVNSWLGNIIMYAPTLWARAILMTHFFSILLAQEQLEKTLDCQIYGACYSIEPLDLPQIIQRLHGLSAFSLHSYSPGEDNRVISCLRKLGIPPLRVWRHRARSVRARLLSQGGRAATCGKYLFNWAVRTKLKLTPIPAASQLDLSSWFVAGYSGGDIYHSLSRARPRWFMWCLLLLSVGVGIYLLPNR

SEQ ID NO: 101 - protein, 591 aa, Artificial Sequence
  Synthetic peptide
SMSYTWTGALITPCAAEETKLPINALSNSLLRHHNLVYATTSRSASLRQKKVTFDRLQVLDDHYRDVLKEMKAKASTVKAKLLSVEEACKLTPPHSARSKFGYGAKDVRNLSSKAVNHIRSVWKDLLEDTETPIDTTIMAKNEVFCVQPEKGGRKPARLIVFPDLGVRVCEKMALYDVVSTLPQAVMGSSYGFQYSPGQRVEFLVNAWKAKKCPMGFAYDTRCFDSTVTENDIRVEESIYQCCDLAPEARQAIRSLTERLYIGGPLTNSKGQNCGYRRCRASGVLTTSCGNTLTCYLKAAAACRAAKLQDCTMLVCGDDLVVICESAGTQEDEASLRAFTEAMTRYSAPPGDPPKPEYDLELITSCSSNVSVAHDASGKRVYYLTRDPTTPLARAAWETARHTPVNSWLGNIIMYAPTLWARAILMTHFFSILLAQEQLEKTLDCQIYGACYSIEPLDLPQIIQRLHGLSAFSLHSYSPGEDNRVTSCLRKLGIPPLRVWRHRARSVRARLLSQGGRAATCGKYLFNWAVRTKLKLTPIPAASQLDLSSWFVAGYSGGDIYHSLSRARPRWFMWCLLLLSVGVGIYLLPNR

SEQ ID NO: 102 - protein, 591 aa, Artificial Sequence
  Synthetic peptide
SMSYTWTGALITPCAAEETKLPINALSNSLLRHHNLVYATTSRSASLRQKKVTFDRLQVLDDHYRDVLKEMKAKASTVKAKLLSVEEACKLTPPHSARSKFGYGAKDVRNLSSKAVNHIRSVWKDLLEDTETPIDTTIMAKNEVFCVQPEKGGRKPARLIVFPDLGVRVCEKMALYDVVSTLPQAVMGSSYGFQYSPGQRVEFLVNAWKAKKCPMGFAYDTRCFDSTVTENDIRVEESIYQCCDLAPEARQAIRSLTERLYIGGPLTNSKGQNCGYRRCRASGVLTTSCGNTLTCYLKAAAACRAAKLQDCTMLVCGDDLVVICESAGTQEDEASLRAFTEAMTRYSAPPGDPPKPEYDLELITSCSSNVSVAHDASGKRVYYLTRDPTTPLARAAWETARHTPVNSWLGNIIMYAPTLWARAILMTHFFSILLAQEQLEKTLDCQIYGACYSIEPLDLPQIIQRLHGLSAFSLHSYSPGEDNRVSSCLRKLGIPPLRVWRHRARSVRARLLSQGGRAATCGKYLFNWAVRTKLKLTPIPAASQLDLSSWFVAGYSGGDIYHSLSRARPRWFMWCLLLLSVGVGIYLLPNR

SEQ ID NO: 103 - protein, 591 aa, Artificial Sequence
  Synthetic peptide
SMSYTWTGALITPCAAEETKLPINALSNSLLRHHNLVYATTSRSASLRQKKVTFDRLQVLDDHYRDVLKEMKAKASTVKAKLLSVEEACKLTPPHSARSKFGYGAKDVRNLSSKAVNHIRSVWKDLLEDTETPIDTTIMAKNEVFCVQPEKGGRKPARLIVFPDLGVRVCEKMALYDVVSTLPQAVMGSSYGFQYSPGQRVEFLVNAWKAKKCPMGFAYDTRCFDSTVTENDIRVEESIYQCCDLAPEARQAIRSLTERLYIGGPLTNSKGQNCGYRRCRASGVLTTSCGNTLTCYLKAAAACRAAKLQDCTMLVCGDDLVVICESAGTQEDEASLRAFTEAMTRYSAPPGDPPKPEYDLELITSCSSNVSVAHDASGKRVYYLTRDPTTPLARAAWETARHTPVNSWLGNIIMYAPTCWARMILMTHFFSILLAQEQLEKTLDCQIYGACYSIEPLDLPQIIQRLHGLSAFSLHSYSPGEINRVASCLRKLGVPPLRVWRHRARSVRARLLSQGGRAATCGKYLFNWAVRTKLKLTPIPAASQLDLSSWFVAGYSGGDIYHSLSRARPRWFMWCLLLLSVGVGIYLLPNR

SEQ ID NO: 104 - protein, 591 aa, Artificial Sequence
  Synthetic peptide
SMSYTWTGALITPCAAEETKLPINALSNSLLRHHNLVYATTSRSASLRQKKVTFDRLQVLDDHYRDVLKEMKAKASTVKAKLLSVEEACKLTPPHSARSKFGYGAKDVRNLSSKAVNHIRSVWKDLLEDTETPIDTTIMAKNEVFCVQPEKGGRKPARLIVFPDLGVRVCEKMALYDVVSTLPQAVMGSSYGFQYSPGQRVEFLVNAWKAKKCPMGFAYDTRCFDSTVTENDIRVEESIYQCCDLAPEARQAIRSLTERLYIGGPLTNSKGQNCGYRRCRASGVLTTSCGNTLTCYLKAAAACRAAKLQDCTMLVCGDDLVVICESAGTQEDEASLRAFTEAMTRYSAPPGDPPKPEYDLELITSCSSNVSVAHDASGKRVYYLTRDPTTPLARAAWETARHTPVNSWLGNIIMYAPTCWARMILMTHFFSILLAQEQLEKTLDCQIYGACYSIEPLDLPQIIQRLHGLSAFSLHSYSPGEINRVVSCLRKLGVPPLRVWRHRARSVRARLLSQGGRAATCGKYLFNWAVRTKLKLTPIPAASQLDLSSWFVAGYSGGDIYHSLSRARPRWFMWCLLLLSVGVGIYLLPNR

SEQ ID NO: 105 - protein, 591 aa, Artificial Sequence
  Synthetic peptide
SMSYTWTGALITPCAAEETKLPINALSNSLLRHHNLVYATTSRSASLRQKKVTFDRLQVLDDHYRDVLKEMKAKASTVKAKLLSVEEACKLTPPHSARSKFGYGAKDVRNLSSKAVNHIRSVWKDLLEDTETPIDTTIMAKNEVFCVQPEKGGRKPARLIVFPDLGVRVCEKMALYDVVSTLPQAVMGSSYGFQYSPGQRVEFLVNAWKAKKCPMGFAYDTRCFDSTVTENDIRVEESIYQCCDLAPEARQAIRSLTERLYIGGPLTNSKGQNCGYRRCRASGVLTTSCGNTLTCYLKAAAACRAAKLQDCTMLVCGDDLVVICESAGTQEDEASLRAFTEAMTRYSAPPGDPPKPEYDLELITSCSSNVSVAHDASGKRVYYLTRDPTTPLARAAWETARHTPVNSWLGNIIMYAPTCWARMILMTHFFSILLAQEQLEKTLDCQIYGACYSIEPLDLPQIIQRLHGLSAFSLHSYSPGEINRVISCLRKLGVPPLRVWRHRARSVRARLLSQGGRAATCGKYLFNWAVRTKLKLTPIPAASQLDLSSWFVAGYSGGDIYHSLSRARPRWFMWCLLLLSVGVGIYLLPNR

SEQ ID NO: 106 - protein, 591 aa, Artificial Sequence
  Synthetic peptide
SMSYTWTGALITPCAAEETKLPINALSNSLLRHHNLVYATTSRSASLRQKKVTFDRLQVLDDHYRDVLKEMKAKASTVKAKLLSVEEACKLTPPHSARSKFGYGAKDVRNLSSKAVNHIRSVWKDLLEDTETPIDTTIMAKNEVFCVQPEKGGRKPARLIVFPDLGVRVCEKMALYDVVSTLPQAVMGSSYGFQYSPGQRVEFLVNAWKAKKCPMGFAYDTRCFDSTVTENDIRVEESIYQCCDLAPEARQAIRSLTERLYIGGPLTNSKGQNCGYRRCRASGVLTTSCGNTLTCYLKAAAACRAAKLQDCTMLVCGDDLVVICESAGTQEDEASLRAFTEAMTRYSAPPGDPPKPEYDLELITSCSSNVSVAHDASGKRVYYLTRDPTTPLARAAWETARHTPVNSWLGNIIMYAPTCWARMILMTHFFSILLAQEQLEKTLDCQIYGACYSIEPLDLPQIIQRLHGLSAFSLHSYSPGEINRVTSCLRKLGVPPLRVWRHRARSVRARLLSQGGRAATCGKYLFNWAVRTKLKLTPIPAASQLDLSSWFVAGYSGGDIYHSLSRARPRWFMWCLLLLSVGVGIYLLPNR

SEQ ID NO: 107 - protein, 591 aa, Artificial Sequence
  Synthetic peptide
SMSYTWTGALITPCAAEETKLPINALSNSLLRHHNLVYATTSRSASLRQKKVTFDRLQVLDDHYRDVLKEMKAKASTVKAKLLSVEEACKLTPPHSARSKFGYGAKDVRNLSSKAVNHIRSVWKDLLEDTETPIDTTIMAKNEVFCVQPEKGGRKPARLIVFPDLGVRVCEKMALYDVVSTLPQAVMGSSYGFQYSPGQRVEFLVNAWKAKKCPMGFAYDTRCFDSTVTENDIRVEESIYQCCDLAPEARQAIRSLTERLYIGGPLTNSKGQNCGYRRCRASGVLTTSCGNTLTCYLKAAAACRAAKLQDCTMLVCGDDLVVICESAGTQEDEASLRAFTEAMTRYSAPPGDPPKPEYDLELITSCSSNVSVAHDASGKRVYYLTRDPTTPLARAAWETARHTPVNSWLGNIIMYAPTCWARMILMTHFFSILLAQEQLEKTLDCQIYGACYSIEPLDLPQIIQRLHGLSAFSLHSYSPGEINRVSSCLRKLGVPPLRVWRHRARSVRARLLSQGGRAATCGKYLFNWAVRTKLKLTPIPAASQLDLSSWFVAGYSGGDIYHSLSRARPRWFMWCLLLLSVGVGIYLLPNR

SEQ ID NO: 108 - protein, 591 aa, Artificial Sequence
  Synthetic peptide
SMSYTWTGALITPCAAEETKLPINALSNSLLRHHNLVYATTSRSASLRQKKVTFDRLQVLDDHYRDVLKEMKAKASTVKAKLLSVEEACKLTPPHSARSKFGYGAKDVRNLSSKAVNHIRSVWKDLLEDTETPIDTTIMAKNEVFCVQPEKGGRKPARLIVFPDLGVRVCEKMALYDVVSTLPQAVMGSSYGFQYSPGQRVEFLVNAWKAKKCPMGFAYDTRCFDSTVTENDIRVEESIYQCCDLAPEARQAIRSLTERLYIGGPLTNSKGQNCGYRRCRASGVLTTSCGNTLTCYLKAAAACRAAKLQDCTMLVCGDDLVVICESAGTQEDEASLRAFTEAMTRYSAPPGDPPKPEYDLELITSCSSNVSVAHDASGKRVYYLTRDPTTPLARAAWETARHTPVNSWLGNIIMYAPTCWARMILMTHFFSILLAQEQLEKTLDCQIYGACYSIEPLDLPQIIQRLHGLSAFSLHSYSPGEINRVASCLRKLGIPPLRVWRHRARSVRARLLSQGGRAATCGKYLFNWAVRTKLKLTPIPAASQLDLSSWFVAGYSGGDIYHSLSRARPRWFMWCLLLLSVGVGIYLLPNR

SEQ ID NO: 109 - protein, 591 aa, Artificial Sequence
  Synthetic peptide
SMSYTWTGALITPCAAEETKLPINALSNSLLRHHNLVYATTSRSASLRQKKVTFDRLQVLDDHYRDVLKEMKAKASTVKAKLLSVEEACKLTPPHSARSKFGYGAKDVRNLSSKAVNHIRSVWKDLLEDTETPIDTTIMAKNEVFCVQPEKGGRKPARLIVFPDLGVRVCEKMALYDVVSTLPQAVMGSSYGFQYSPGQRVEFLVNAWKAKKCPMGFAYDTRCFDSTVTENDIRVEESIYQCCDLAPEARQAIRSLTERLYIGGPLTNSKGQNCGYRRCRASGVLTTSCGNTLTCYLKAAAACRAAKLQDCTMLVCGDDLVVICESAGTQEDEASLRAFTEAMTRYSAPPGDPPKPEYDLELITSCSSNVSVAHDASGKRVYYLTRDPTTPLARAAWETARHTPVNSWLGNIIMYAPTCWARMILMTHFFSILLAQEQLEKTLDCQIYGACYSIEPLDLPQIIQRLHGLSAFSLHSYSPGEINRVVSCLRKLGIPPLRVWRHRARSVRARLLSQGGRAATCGKYLFNWAVRTKLKLTPIPAASQLDLSSWFVAGYSGGDIYHSLSRARPRWFMWCLLLLSVGVGIYLLPNR

SEQ ID NO: 110 - protein, 591 aa, Artificial Sequence
  Synthetic peptide
SMSYTWTGALITPCAAEETKLPINALSNSLLRHHNLVYATTSRSASLRQKKVTFDRLQVLDDHYRDVLKEMKAKASTVKAKLLSVEEACKLTPPHSARSKFGYGAKDVRNLSSKAVNHIRSVWKDLLEDTETPIDTTIMAKNEVFCVQPEKGGRKPARLIVFPDLGVRVCEKMALYDVVSTLPQAVMGSSYGFQYSPGQRVEFLVNAWKAKKCPMGFAYDTRCFDSTVTENDIRVEESIYQCCDLAPEARQAIRSLTERLYIGGPLTNSKGQNCGYRRCRASGVLTTSCGNTLTCYLKAAAACRAAKLQDCTMLVCGDDLVVICESAGTQEDEASLRAFTEAMTRYSAPPGDPPKPEYDLELITSCSSNVSVAHDASGKRVYYLTRDPTTPLARAAWETARHTPVNSWLGNIIMYAPTCWARMILMTHFFSILLAQEQLEKTLDCQIYGACYSIEPLDLPQIIQRLHGLSAFSLHSYSPGEINRVISCLRKLGIPPLRVWRHRARSVRARLLSQGGRAATCGKYLFNWAVRTKLKLTPIPAASQLDLSSWFVAGYSGGDIYHSLSRARPRWFMWCLLLLSVGVGIYLLPNR

SEQ ID NO: 111 - protein, 591 aa, Artificial Sequence
  Synthetic peptide
SMSYTWTGALITPCAAEETKLPINALSNSLLRHHNLVYATTSRSASLRQKKVTFDRLQVLDDHYRDVLKEMKAKASTVKAKLLSVEEACKLTPPHSARSKFGYGAKDVRNLSSKAVNHIRSVWKDLLEDTETPIDTTIMAKNEVFCVQPEKGGRKPARLIVFPDLGVRVCEKMALYDVVSTLPQAVMGSSYGFQYSPGQRVEFLVNAWKAKKCPMGFAYDTRCFDSTVTENDIRVEESIYQCCDLAPEARQAIRSLTERLYIGGPLTNSKGQNCGYRRCRASGVLTTSCGNTLTCYLKAAAACRAAKLQDCTMLVCGDDLVVICESAGTQEDEASLRAFTEAMTRYSAPPGDPPKPEYDLELITSCSSNVSVAHDASGKRVYYLTRDPTTPLARAAWETARHTPVNSWLGNIIMYAPTCWARMILMTHFFSILLAQEQLEKTLDCQIYGACYSIEPLDLPQIIQRLHGLSAFSLHSYSPGEINRVTSCLRKLGIPPLRVWRHRARSVRARLLSQGGRAATCGKYLFNWAVRTKLKLTPIPAASQLDLSSWFVAGYSGGDIYHSLSRARPRWFMWCLLLLSVGVGIYLLPNR

SEQ ID NO: 112 - protein, 591 aa, Artificial Sequence
  Synthetic peptide
SMSYTWTGALITPCAAEETKLPINALSNSLLRHHNLVYATTSRSASLRQKKVTFDRLQVLDDHYRDVLKEMKAKASTVKAKLLSVEEACKLTPPHSARSKFGYGAKDVRNLSSKAVNHIRSVWKDLLEDTETPIDTTIMAKNEVFCVQPEKGGRKPARLIVFPDLGVRVCEKMALYDVVSTLPQAVMGSSYGFQYSPGQRVEFLVNAWKAKKCPMGFAYDTRCFDSTVTENDIRVEESIYQCCDLAPEARQAIRSLTERLYIGGPLTNSKGQNCGYRRCRASGVLTTSCGNTLTCYLKAAAACRAAKLQDCTMLVCGDDLVVICESAGTQEDEASLRAFTEAMTRYSAPPGDPPKPEYDLELITSCSSNVSVAHDASGKRVYYLTRDPTTPLARAAWETARHTPVNSWLGNIIMYAPTCWARMILMTHFFSILLAQEQLEKTLDCQIYGACYSIEPLDLPQIIQRLHGLSAFSLHSYSPGEINRVSSCLRKLGIPPLRVWRHRARSVRARLLSQGGRAATCGKYLFNWAVRTKLKLTPIPAASQLDLSSWFVAGYSGGDIYHSLSRARPRWFMWCLLLLSVGVGIYLLPNR

SEQ ID NO: 113 - protein, 591 aa, Artificial Sequence
  Synthetic peptide
SMSYTWTGALITPCAAEETKLPINALSNSLLRHHNLVYATTSRSASLRQKKVTFDRLQVLDDHYRDVLKEMKAKASTVKAKLLSVEEACKLTPPHSARSKFGYGAKDVRNLSSKAVNHIRSVWKDLLEDTETPIDTTIMAKNEVFCVQPEKGGRKPARLIVFPDLGVRVCEKMALYDVVSTLPQAVMGSSYGFQYSPGQRVEFLVNAWKAKKCPMGFAYDTRCFDSTVTENDIRVEESIYQCCDLAPEARQAIRSLTERLYIGGPLTNSKGQNCGYRRCRASGVLTTSCGNTLTCYLKAAAACRAAKLQDCTMLVCGDDLVVICESAGTQEDEASLRAFTEAMTRYSAPPGDPPKPEYDLELITSCSSNVSVAHDASGKRVYYLTRDPTTPLARAAWETARHTPVNSWLGNIIMYAPTCWARAILMTHFFSILLAQEQLEKTLDCQIYGACYSIEPLDLPQIIQRLHGLSAFSLHSYSPGEINRVASCLRKLGVPPLRVWRHRARSVRARLLSQGGRAATCGKYLFNWAVRTKLKLTPIPAASQLDLSSWFVAGYSGGDIYHSLSRARPRWFMWCLLLLSVGVGIYLLPNR

SEQ ID NO: 114 - protein, 591 aa, Artificial Sequence
  Synthetic peptide
SMSYTWTGALITPCAAEETKLPINALSNSLLRHHNLVYATTSRSASLRQKKVTFDRLQVLDDHYRDVLKEMKAKASTVKAKLLSVEEACKLTPPHSARSKFGYGAKDVRNLSSKAVNHIRSVWKDLLEDTETPIDTTIMAKNEVFCVQPEKGGRKPARLIVFPDLGVRVCEKMALYDVVSTLPQAVMGSSYGFQYSPGQRVEFLVNAWKAKKCPMGFAYDTRCFDSTVTENDIRVEESIYQCCDLAPEARQAIRSLTERLYIGGPLTNSKGQNCGYRRCRASGVLTTSCGNTLTCYLKAAAACRAAKLQDCTMLVCGDDLVVICESAGTQEDEASLRAFTEAMTRYSAPPGDPPKPEYDLELITSCSSNVSVAHDASGKRVYYLTRDPTTPLARAAWETARHTPVNSWLGNIIMYAPTCWARAILMTHFFSILLAQEQLEKTLDCQIYGACYSIEPLDLPQIIQRLHGLSAFSLHSYSPGEINRVVSCLRKLGVPPLRVWRHRARSVRARLLSQGGRAATCGKYLFNWAVRTKLKLTPIPAASQLDLSSWFVAGYSGGDIYHSLSRARPRWFMWCLLLLSVGVGIYLLPNR

SEQ ID NO: 115 - protein, 591 aa, Artificial Sequence
  Synthetic peptide
SMSYTWTGALITPCAAEETKLPINALSNSLLRHHNLVYATTSRSASLRQKKVTFDRLQVLDDHYRDVLKEMKAKASTVKAKLLSVEEACKLTPPHSARSKFGYGAKDVRNLSSKAVNHIRSVWKDLLEDTETPIDTTIMAKNEVFCVQPEKGGRKPARLIVFPDLGVRVCEKMALYDVVSTLPQAVMGSSYGFQYSPGQRVEFLVNAWKAKKCPMGFAYDTRCFDSTVTENDIRVEESIYQCCDLAPEARQAIRSLTERLYIGGPLTNSKGQNCGYRRCRASGVLTTSCGNTLTCYLKAAAACRAAKLQDCTMLVCGDDLVVICESAGTQEDEASLRAFTEAMTRYSAPPGDPPKPEYDLELITSCSSNVSVAHDASGKRVYYLTRDPTTPLARAAWETARHTPVNSWLGNIIMYAPTCWARAILMTHFFSILLAQEQLEKTLDCQIYGACYSIEPLDLPQIIQRLHGLSAFSLHSYSPGEINRVISCLRKLGVPPLRVWRHRARSVRARLLSQGGRAATCGKYLFNWAVRTKLKLTPIPAASQLDLSSWFVAGYSGGDIYHSLSRARPRWFMWCLLLLSVGVGIYLLPNR

SEQ ID NO: 116 - protein, 591 aa, Artificial Sequence
  Synthetic peptide
SMSYTWTGALITPCAAEETKLPINALSNSLLRHHNLVYATTSRSASLRQKKVTFDRLQVLDDHYRDVLKEMKAKASTVKAKLLSVEEACKLTPPHSARSKFGYGAKDVRNLSSKAVNHIRSVWKDLLEDTETPIDTTIMAKNEVFCVQPEKGGRKPARLIVFPDLGVRVCEKMALYDVVSTLPQAVMGSSYGFQYSPGQRVEFLVNAWKAKKCPMGFAYDTRCFDSTVTENDIRVEESIYQCCDLAPEARQAIRSLTERLYIGGPLTNSKGQNCGYRRCRASGVLTTSCGNTLTCYLKAAAACRAAKLQDCTMLVCGDDLVVICESAGTQEDEASLRAFTEAMTRYSAPPGDPPKPEYDLELITSCSSNVSVAHDASGKRVYYLTRDPTTPLARAAWETARHTPVNSWLGNIIMYAPTCWARAILMTHFFSILLAQEQLEKTLDCQIYGACYSIEPLDLPQIIQRLHGLSAFSLHSYSPGEINRVTSCLRKLGVPPLRVWRHRARSVRARLLSQGGRAATCGKYLFNWAVRTKLKLTPIPAASQLDLSSWFVAGYSGGDIYHSLSRARPRWFMWCLLLLSVGVGIYLLPNR

SEQ ID NO: 117 - protein, 591 aa, Artificial Sequence
  Synthetic peptide
SMSYTWTGALITPCAAEETKLPINALSNSLLRHHNLVYATTSRSASLRQKKVTFDRLQVLDDHYRDVLKEMKAKASTVKAKLLSVEEACKLTPPHSARSKFGYGAKDVRNLSSKAVNHIRSVWKDLLEDTETPIDTTIMAKNEVFCVQPEKGGRKPARLIVFPDLGVRVCEKMALYDVVSTLPQAVMGSSYGFQYSPGQRVEFLVNAWKAKKCPMGFAYDTRCFDSTVTENDIRVEESIYQCCDLAPEARQAIRSLTERLYIGGPLTNSKGQNCGYRRCRASGVLTTSCGNTLTCYLKAAAACRAAKLQDCTMLVCGDDLVVICESAGTQEDEASLRAFTEAMTRYSAPPGDPPKPEYDLELITSCSSNVSVAHDASGKRVYYLTRDPTTPLARAAWETARHTPVNSWLGNIIMYAPTCWARAILMTHFFSILLAQEQLEKTLDCQIYGACYSIEPLDLPQIIQRLHGLSAFSLHSYSPGEINRVSSCLRKLGVPPLRVWRHRARSVRARLLSQGGRAATCGKYLFNWAVRTKLKLTPIPAASQLDLSSWFVAGYSGGDIYHSLSRARPRWFMWCLLLLSVGVGIYLLPNR

SEQ ID NO: 118 - protein, 591 aa, Artificial Sequence
  Synthetic peptide
SMSYTWTGALITPCAAEETKLPINALSNSLLRHHNLVYATTSRSASLRQKKVTFDRLQVLDDHYRDVLKEMKAKASTVKAKLLSVEEACKLTPPHSARSKFGYGAKDVRNLSSKAVNHIRSVWKDLLEDTETPIDTTIMAKNEVFCVQPEKGGRKPARLIVFPDLGVRVCEKMALYDVVSTLPQAVMGSSYGFQYSPGQRVEFLVNAWKAKKCPMGFAYDTRCFDSTVTENDIRVEESIYQCCDLAPEARQAIRSLTERLYIGGPLTNSKGQNCGYRRCRASGVLTTSCGNTLTCYLKAAAACRAAKLQDCTMLVCGDDLVVICESAGTQEDEASLRAFTEAMTRYSAPPGDPPKPEYDLELITSCSSNVSVAHDASGKRVYYLTRDPTTPLARAAWETARHTPVNSWLGNIIMYAPTCWARAILMTHFFSILLAQEQLEKTLDCQIYGACYSIEPLDLPQIIQRLHGLSAFSLHSYSPGEINRVASCLRKLGIPPLRVWRHRARSVRARLLSQGGRAATCGKYLFNWAVRTKLKLTPIPAASQLDLSSWFVAGYSGGDIYHSLSRARPRWFMWCLLLLSVGVGIYLLPNR

SEQ ID NO: 119 - protein, 591 aa, Artificial Sequence
  Synthetic peptide
SMSYTWTGALITPCAAEETKLPINALSNSLLRHHNLVYATTSRSASLRQKKVTFDRLQVLDDHYRDVLKEMKAKASTVKAKLLSVEEACKLTPPHSARSKFGYGAKDVRNLSSKAVNHIRSVWKDLLEDTETPIDTTIMAKNEVFCVQPEKGGRKPARLIVFPDLGVRVCEKMALYDVVSTLPQAVMGSSYGFQYSPGQRVEFLVNAWKAKKCPMGFAYDTRCFDSTVTENDIRVEESIYQCCDLAPEARQAIRSLTERLYIGGPLTNSKGQNCGYRRCRASGVLTTSCGNTLTCYLKAAAACRAAKLQDCTMLVCGDDLVVICESAGTQEDEASLRAFTEAMTRYSAPPGDPPKPEYDLELITSCSSNVSVAHDASGKRVYYLTRDPTTPLARAAWETARHTPVNSWLGNIIMYAPTCWARAILMTHFFSILLAQEQLEKTLDCQIYGACYSIEPLDLPQIIQRLHGLSAFSLHSYSPGEINRVVSCLRKLGIPPLRVWRHRARSVRARLLSQGGRAATCGKYLFNWAVRTKLKLTPIPAASQLDLSSWFVAGYSGGDIYHSLSRARPRWFMWCLLLLSVGVGIYLLPNR

SEQ ID NO: 120 - protein, 591 aa, Artificial Sequence
  Synthetic peptide
SMSYTWTGALITPCAAEETKLPINALSNSLLRHHNLVYATTSRSASLRQKKVTFDRLQVLDDHYRDVLKEMKAKASTVKAKLLSVEEACKLTPPHSARSKFGYGAKDVRNLSSKAVNHIRSVWKDLLEDTETPIDTTIMAKNEVFCVQPEKGGRKPARLIVFPDLGVRVCEKMALYDVVSTLPQAVMGSSYGFQYSPGQRVEFLVNAWKAKKCPMGFAYDTRCFDSTVTENDIRVEESIYQCCDLAPEARQAIRSLTERLYIGGPLTNSKGQNCGYRRCRASGVLTTSCGNTLTCYLKAAAACRAAKLQDCTMLVCGDDLVVICESAGTQEDEASLRAFTEAMTRYSAPPGDPPKPEYDLELITSCSSNVSVAHDASGKRVYYLTRDPTTPLARAAWETARHTPVNSWLGNIIMYAPTCWARAILMTHFFSILLAQEQLEKTLDCQIYGACYSIEPLDLPQIIQRLHGLSAFSLHSYSPGEINRVISCLRKLGIPPLRVWRHRARSVRARLLSQGGRAATCGKYLFNWAVRTKLKLTPIPAASQLDLSSWFVAGYSGGDIYHSLSRARPRWFMWCLLLLSVGVGIYLLPNR

SEQ ID NO: 121 - protein, 591 aa, Artificial Sequence
  Synthetic peptide
SMSYTWTGALITPCAAEETKLPINALSNSLLRHHNLVYATTSRSASLRQKKVTFDRLQVLDDHYRDVLKEMKAKASTVKAKLLSVEEACKLTPPHSARSKFGYGAKDVRNLSSKAVNHIRSVWKDLLEDTETPIDTTIMAKNEVFCVQPEKGGRKPARLIVFPDLGVRVCEKMALYDVVSTLPQAVMGSSYGFQYSPGQRVEFLVNAWKAKKCPMGFAYDTRCFDSTVTENDIRVEESIYQCCDLAPEARQAIRSLTERLYIGGPLTNSKGQNCGYRRCRASGVLTTSCGNTLTCYLKAAAACRAAKLQDCTMLVCGDDLVVICESAGTQEDEASLRAFTEAMTRYSAPPGDPPKPEYDLELITSCSSNVSVAHDASGKRVYYLTRDPTTPLARAAWETARHTPVNSWLGNIIMYAPTCWARAILMTHFFSILLAQEQLEKTLDCQIYGACYSIEPLDLPQIIQRLHGLSAFSLHSYSPGEINRVTSCLRKLGIPPLRVWRHRARSVRARLLSQGGRAATCGKYLFNWAVRTKLKLTPIPAASQLDLSSWFVAGYSGGDIYHSLSRARPRWFMWCLLLLSVGVGIYLLPNR

SEQ ID NO: 122 - protein, 591 aa, Artificial Sequence
  Sythetic peptide
SMSYTWTGALITPCAAEETKLPINALSNSLLRHHNLVYATTSRSASLRQKKVTFDRLQVLDDHYRDVLKEMKAKASTVKAKLLSVEEACKLTPPHSARSKFGYGAKDVRNLSSKAVNHIRSVWKDLLEDTETPIDTTIMAKNEVFCVQPEKGGRKPARLIVFPDLGVRVCEKMALYDVVSTLPQAVMGSSYGFQYSPGQRVEFLVNAWKAKKCPMGFAYDTRCFDSTVTENDIRVEESIYQCCDLAPEARQAIRSLTERLYIGGPLTNSKGQNCGYRRCRASGVLTTSCGNTLTCYLKAAAACRAAKLQDCTMLVCGDDLVVICESAGTQEDEASLRAFTEAMTRYSAPPGDPPKPEYDLELITSCSSNVSVAHDASGKRVYYLTRDPTTPLARAAWETARHTPVNSWLGNIIMYAPTCWARAILMTHFFSILLAQEQLEKTLDCQIYGACYSIEPLDLPQIIQRLHGLSAFSLHSYSPGEINRVSSCLRKLGIPPLRVWRHRARSVRARLLSQGGRAATCGKYLFNWAVRTKLKLTPIPAASQLDLSSWFVAGYSGGDIYHSLSRARPRWFMWCLLLLSVGVGIYLLPNR

SEQ ID NO: 123 - protein, 591 aa, Artificial Sequence
  Synthetic peptide
SMSYTWTGALITPCAAEETKLPINALSNSLLRHHNLVYATTSRSASLRQKKVTFDRLQVLDDHYRDVLKEMKAKASTVKAKLLSVEEACKLTPPHSARSKFGYGAKDVRNLSSKAVNHIRSVWKDLLEDTETPIDTTIMAKNEVFCVQPEKGGRKPARLIVFPDLGVRVCEKMALYDVVSTLPQAVMGSSYGFQYSPGQRVEFLVNAWKAKKCPMGFAYDTRCFDSTVTENDIRVEESIYQCCDLAPEARQAIRSLTERLYIGGPLTNSKGQNCGYRRCRASGVLTTSCGNTLTCYLKAAAACRAAKLQDCTMLVCGDDLVVICESAGTQEDEASLRAFTEAMTRYSAPPGDPPKPEYDLELITSCSSNVSVAHDASGKRVYYLTRDPTTPLARAAWETARHTPVNSWLGNIIMYAPTCWARMILMTHFFSILLAQEQLEKTLDCQIYGACYSIEPLDLPQIIQRLHGLSAFSLHSYSPGEANRVASCLRKLGVPPLRVWRHRARSVRARLLSQGGRAATCGKYLFNWAVRTKLKLTPIPAASQLDLSSWFVAGYSGGDIYHSLSRARPRWFMWCLLLLSVGVGIYLLPNR

SEQ ID NO: 124 - protein, 591 aa, Artificial Sequence
  Synthetic peptide
SMSYTWTGALITPCAAEETKLPINALSNSLLRHHNLVYATTSRSASLRQKKVTFDRLQVLDDHYRDVLKEMKAKASTVKAKLLSVEEACKLTPPHSARSKFGYGAKDVRNLSSKAVNHIRSVWKDLLEDTETPIDTTIMAKNEVFCVQPEKGGRKPARLIVFPDLGVRVCEKMALYDVVSTLPQAVMGSSYGFQYSPGQRVEFLVNAWKAKKCPMGFAYDTRCFDSTVTENDIRVEESIYQCCDLAPEARQAIRSLTERLYIGGPLTNSKGQNCGYRRCRASGVLTTSCGNTLTCYLKAAAACRAAKLQDCTMLVCGDDLVVICESAGTQEDEASLRAFTEAMTRYSAPPGDPPKPEYDLELITSCSSNVSVAHDASGKRVYYLTRDPTTPLARAAWETARHTPVNSWLGNIIMYAPTCWARMILMTHFFSILLAQEQLEKTLDCQIYGACYSIEPLDLPQIIQRLHGLSAFSLHSYSPGEANRVVSCLRKLGVPPLRVWRHRARSVRARLLSQGGRAATCGKYLFNWAVRTKLKLTPIPAASQLDLSSWFVAGYSGGDIYHSLSRARPRWFMWCLLLLSVGVGIYLLPNR

SEQ ID NO: 125 - protein, 591 aa, Artificial Sequence
  Synthetic peptid
SMSYTWTGALITPCAAEETKLPINALSNSLLRHHNLVYATTSRSASLRQKKVTFDRLQVLDDHYRDVLKEMKAKASTVKAKLLSVEEACKLTPPHSARSKFGYGAKDVRNLSSKAVNHIRSVWKDLLEDTETPIDTTIMAKNEVFCVQPEKGGRKPARLIVFPDLGVRVCEKMALYDVVSTLPQAVMGSSYGFQYSPGQRVEFLVNAWKAKKCPMGFAYDTRCFDSTVTENDIRVEESIYQCCDLAPEARQAIRSLTERLYIGGPLTNSKGQNCGYRRCRASGVLTTSCGNTLTCYLKAAAACRAAKLQDCTMLVCGDDLVVICESAGTQEDEASLRAFTEAMTRYSAPPGDPPKPEYDLELITSCSSNVSVAHDASGKRVYYLTRDPTTPLARAAWETARHTPVNSWLGNIIMYAPTCWARMILMTHFFSILLAQEQLEKTLDCQIYGACYSIEPLDLPQIIQRLHGLSAFSLHSYSPGEANRVISCLRKLGVPPLRVWRHRARSVRARLLSQGGRAATCGKYLFNWAVRTKLKLTPIPAASQLDLSSWFVAGYSGGDIYHSLSRARPRWFMWCLLLLSVGVGIYLLPNR

SEQ ID NO: 126 - protein, 591 aa, Artificial Sequence
  Synthetic peptide
SMSYTWTGALITPCAAEETKLPINALSNSLLRHHNLVYATTSRSASLRQKKVTFDRLQVLDDHYRDVLKEMKAKASTVKAKLLSVEEACKLTPPHSARSKFGYGAKDVRNLSSKAVNHIRSVWKDLLEDTETPIDTTIMAKNEVFCVQPEKGGRKPARLIVFPDLGVRVCEKMALYDVVSTLPQAVMGSSYGFQYSPGQRVEFLVNAWKAKKCPMGFAYDTRCFDSTVTENDIRVEESIYQCCDLAPEARQAIRSLTERLYIGGPLTNSKGQNCGYRRCRASGVLTTSCGNTLTCYLKAAAACRAAKLQDCTMLVCGDDLVVICESAGTQEDEASLRAFTEAMTRYSAPPGDPPKPEYDLELITSCSSNVSVAHDASGKRVYYLTRDPTTPLARAAWETARHTPVNSWLGNIIMYAPTCWARMILMTHFFSILLAQEQLEKTLDCQIYGACYSIEPLDLPQIIQRLHGLSAFSLHSYSPGEANRVTSCLRKLGVPPLRVWRHRARSVRARLLSQGGRAATCGKYLFNWAVRTKLKLTPIPAASQLDLSSWFVAGYSGGDIYHSLSRARPRWFMWCLLLLSVGVGIYLLPNR

SEQ ID NO: 127 - protein, 591 aa, Artificial Sequence
  Synthetic peptide
SMSYTWTGALITPCAAEETKLPINALSNSLLRHHNLVYATTSRSASLRQKKVTFDRLQVLDDHYRDVLKEMKAKASTVKAKLLSVEEACKLTPPHSARSKFGYGAKDVRNLSSKAVNHIRSVWKDLLEDTETPIDTTIMAKNEVFCVQPEKGGRKPARLIVFPDLGVRVCEKMALYDVVSTLPQAVMGSSYGFQYSPGQRVEFLVNAWKAKKCPMGFAYDTRCFDSTVTENDIRVEESIYQCCDLAPEARQAIRSLTERLYIGGPLTNSKGQNCGYRRCRASGVLTTSCGNTLTCYLKAAAACRAAKLQDCTMLVCGDDLVVICESAGTQEDEASLRAFTEAMTRYSAPPGDPPKPEYDLELITSCSSNVSVAHDASGKRVYYLTRDPTTPLARAAWETARHTPVNSWLGNIIMYAPTCWARMILMTHFFSILLAQEQLEKTLDCQIYGACYSIEPLDLPQIIQRLHGLSAFSLHSYSPGEANRVSSCLRKLGVPPLRVWRHRARSVRARLLSQGGRAATCGKYLFNWAVRTKLKLTPIPAASQLDLSSWFVAGYSGGDIYHSLSRARPRWFMWCLLLLSVGVGIYLLPNR

SEQ ID NO: 128 - protein, 591 aa, Artificial Sequence
  Synthetic peptide
SMSYTWTGALITPCAAEETKLPINALSNSLLRHHNLVYATTSRSASLRQKKVTFDRLQVLDDHYRDVLKEMKAKASTVKAKLLSVEEACKLTPPHSARSKFGYGAKDVRNLSSKAVNHIRSVWKDLLEDTETPIDTTIMAKNEVFCVQPEKGGRKPARLIVFPDLGVRVCEKMALYDVVSTLPQAVMGSSYGFQYSPGQRVEFLVNAWKAKKCPMGFAYDTRCFDSTVTENDIRVEESIYQCCDLAPEARQAIRSLTERLYIGGPLTNSKGQNCGYRRCRASGVLTTSCGNTLTCYLKAAAACRAAKLQDCTMLVCGDDLVVICESAGTQEDEASLRAFTEAMTRYSAPPGDPPKPEYDLELITSCSSNVSVAHDASGKRVYYLTRDPTTPLARAAWETARHTPVNSWLGNIIMYAPTCWARMILMTHFFSILLAQEQLEKTLDCQIYGACYSIEPLDLPQIIQRLHGLSAFSLHSYSPGEANRVASCLRKLGIPPLRVWRHRARSVRARLLSQGGRAATCGKYLFNWAVRTKLKLTPIPAASQLDLSSWFVAGYSGGDIYHSLSRARPRWFMWCLLLLSVGVGIYLLPNR

SEQ ID NO: 129 - protein, 591 aa, Artificial Sequence
  Synthetic peptide
SMSYTWTGALITPCAAEETKLPINALSNSLLRHHNLVYATTSRSASLRQKKVTFDRLQVLDDHYRDVLKEMKAKASTVKAKLLSVEEACKLTPPHSARSKFGYGAKDVRNLSSKAVNHIRSVWKDLLEDTETPIDTTIMAKNEVFCVQPEKGGRKPARLIVFPDLGVRVCEKMALYDVVSTLPQAVMGSSYGFQYSPGQRVEFLVNAWKAKKCPMGFAYDTRCFDSTVTENDIRVEESIYQCCDLAPEARQAIRSLTERLYIGGPLTNSKGQNCGYRRCRASGVLTTSCGNTLTCYLKAAAACRAAKLQDCTMLVCGDDLVVICESAGTQEDEASLRAFTEAMTRYSAPPGDPPKPEYDLELITSCSSNVSVAHDASGKRVYYLTRDPTTPLARAAWETARHTPVNSWLGNIIMYAPTCWARMILMTHFFSILLAQEQLEKTLDCQIYGACYSIEPLDLPQIIQRLHGLSAFSLHSYSPGEANRVVSCLRKLGIPPLRVWRHRARSVRARLLSQGGRAATCGKYLFNWAVRTKLKLTPIPAASQLDLSSWFVAGYSGGDIYHSLSRARPRWFMWCLLLLSVGVGIYLLPNR

SEQ ID NO: 130 - protein, 591 aa, Artificial Sequence
  Synthetic peptide
SMSYTWTGALITPCAAEETKLPINALSNSLLRHHNLVYATTSRSASLRQKKVTFDRLQVLDDHYRDVLKEMKAKASTVKAKLLSVEEACKLTPPHSARSKFGYGAKDVRNLSSKAVNHIRSVWKDLLEDTETPIDTTIMAKNEVFCVQPEKGGRKPARLIVFPDLGVRVCEKMALYDVVSTLPQAVMGSSYGFQYSPGQRVEFLVNAWKAKKCPMGFAYDTRCFDSTVTENDIRVEESIYQCCDLAPEARQAIRSLTERLYIGGPLTNSKGQNCGYRRCRASGVLTTSCGNTLTCYLKAAAACRAAKLQDCTMLVCGDDLVVICESAGTQEDEASLRAFTEAMTRYSAPPGDPPKPEYDLELITSCSSNVSVAHDASGKRVYYLTRDPTTPLARAAWETARHTPVNSWLGNIIMYAPTCWARMILMTHFFSILLAQEQLEKTLDCQIYGACYSIEPLDLPQIIQRLHGLSAFSLHSYSPGEANRVISCLRKLGIPPLRVWRHRARSVRARLLSQGGRAATCGKYLFNWAVRTKLKLTPIPAASQLDLSSWFVAGYSGGDIYHSLSRARPRWFMWCLLLLSVGVGIYLLPNR

SEQ ID NO: 131 - protein, 591 aa, Artificial Sequence
  Synthetic peptide
SMSYTWTGALITPCAAEETKLPINALSNSLLRHHNLVYATTSRSASLRQKKVTFDRLQVLDDHYRDVLKEMKAKASTVKAKLLSVEEACKLTPPHSARSKFGYGAKDVRNLSSKAVNHIRSVWKDLLEDTETPIDTTIMAKNEVFCVQPEKGGRKPARLIVFPDLGVRVCEKMALYDVVSTLPQAVMGSSYGFQYSPGQRVEFLVNAWKAKKCPMGFAYDTRCFDSTVTENDIRVEESIYQCCDLAPEARQAIRSLTERLYIGGPLTNSKGQNCGYRRCRASGVLTTSCGNTLTCYLKAAAACRAAKLQDCTMLVCGDDLVVICESAGTQEDEASLRAFTEAMTRYSAPPGDPPKPEYDLELITSCSSNVSVAHDASGKRVYYLTRDPTTPLARAAWETARHTPVNSWLGNIIMYAPTCWARMILMTHFFSILLAQEQLEKTLDCQIYGACYSIEPLDLPQIIQRLHGLSAFSLHSYSPGEANRVTSCLRKLGIPPLRVWRHRARSVRARLLSQGGRAATCGKYLFNWAVRTKLKLTPIPAASQLDLSSWFVAGYSGGDIYHSLSRARPRWFMWCLLLLSVGVGIYLLPNR

SEQ ID NO: 132 - protein, 591 aa, Artificial Sequence
  Synthetic peptide
SMSYTWTGALITPCAAEETKLPINALSNSLLRHHNLVYATTSRSASLRQKKVTFDRLQVLDDHYRDVLKEMKAKASTVKAKLLSVEEACKLTPPHSARSKFGYGAKDVRNLSSKAVNHIRSVWKDLLEDTETPIDTTIMAKNEVFCVQPEKGGRKPARLIVFPDLGVRVCEKMALYDVVSTLPQAVMGSSYGFQYSPGQRVEFLVNAWKAKKCPMGFAYDTRCFDSTVTENDIRVEESIYQCCDLAPEARQAIRSLTERLYIGGPLTNSKGQNCGYRRCRASGVLTTSCGNTLTCYLKAAAACRAAKLQDCTMLVCGDDLVVICESAGTQEDEASLRAFTEAMTRYSAPPGDPPKPEYDLELITSCSSNVSVAHDASGKRVYYLTRDPTTPLARAAWETARHTPVNSWLGNIIMYAPTCWARMILMTHFFSILLAQEQLEKTLDCQIYGACYSIEPLDLPQIIQRLHGLSAFSLHSYSPGEANRVSSCLRKLGIPPLRVWRHRARSVRARLLSQGGRAATCGKYLFNWAVRTKLKLTPIPAASQLDLSSWFVAGYSGGDIYHSLSRARPRWFMWCLLLLSVGVGIYLLPNR

SEQ ID NO: 133 - protein, 591 aa, Artificial Sequence
  Synthetic peptide
SMSYTWTGALITPCAAEETKLPINALSNSLLRHHNLVYATTSRSASLRQKKVTFDRLQVLDDHYRDVLKEMKAKASTVKAKLLSVEEACKLTPPHSARSKFGYGAKDVRNLSSKAVNHIRSVWKDLLEDTETPIDTTIMAKNEVFCVQPEKGGRKPARLIVFPDLGVRVCEKMALYDVVSTLPQAVMGSSYGFQYSPGQRVEFLVNAWKAKKCPMGFAYDTRCFDSTVTENDIRVEESIYQCCDLAPEARQAIRSLTERLYIGGPLTNSKGQNCGYRRCRASGVLTTSCGNTLTCYLKAAAACRAAKLQDCTMLVCGDDLVVICESAGTQEDEASLRAFTEAMTRYSAPPGDPPKPEYDLELITSCSSNVSVAHDASGKRVYYLTRDPTTPLARAAWETARHTPVNSWLGNIIMYAPTCWARAILMTHFFSILLAQEQLEKTLDCQIYGACYSIEPLDLPQIIQRLHGLSAFSLHSYSPGEANRVASCLRKLGVPPLRVWRHRARSVRARLLSQGGRAATCGKYLFNWAVRTKLKLTPIPAASQLDLSSWFVAGYSGGDIYHSLSRARPRWFMWCLLLLSVGVGIYLLPNR

SEQ ID NO: 134 - protein, 591 aa, Artificial Sequence
  Synthetic peptide
SMSYTWTGALITPCAAEETKLPINALSNSLLRHHNLVYATTSRSASLRQKKVTFDRLQVLDDHYRDVLKEMKAKASTVKAKLLSVEEACKLTPPHSARSKFGYGAKDVRNLSSKAVNHIRSVWKDLLEDTETPIDTTIMAKNEVFCVQPEKGGRKPARLIVFPDLGVRVCEKMALYDVVSTLPQAVMGSSYGFQYSPGQRVEFLVNAWKAKKCPMGFAYDTRCFDSTVTENDIRVEESIYQCCDLAPEARQAIRSLTERLYIGGPLTNSKGQNCGYRRCRASGVLTTSCGNTLTCYLKAAAACRAAKLQDCTMLVCGDDLVVICESAGTQEDEASLRAFTEAMTRYSAPPGDPPKPEYDLELITSCSSNVSVAHDASGKRVYYLTRDPTTPLARAAWETARHTPVNSWLGNIIMYAPTCWARAILMTHFFSILLAQEQLEKTLDCQIYGACYSIEPLDLPQIIQRLHGLSAFSLHSYSPGEANRVVSCLRKLGVPPLRVWRHRARSVRARLLSQGGRAATCGKYLFNWAVRTKLKLTPIPAASQLDLSSWFVAGYSGGDIYHSLSRARPRWFMWCLLLLSVGVGIYLLPNR

SEQ ID NO: 135 - protein, 591 aa, Artificial Sequence
  Synthetic peptide
SMSYTWTGALITPCAAEETKLPINALSNSLLRHHNLVYATTSRSASLRQKKVTFDRLQVLDDHYRDVLKEMKAKASTVKAKLLSVEEACKLTPPHSARSKFGYGAKDVRNLSSKAVNHIRSVWKDLLEDTETPIDTTIMAKNEVFCVQPEKGGRKPARLIVFPDLGVRVCEKMALYDVVSTLPQAVMGSSYGFQYSPGQRVEFLVNAWKAKKCPMGFAYDTRCFDSTVTENDIRVEESIYQCCDLAPEARQAIRSLTERLYIGGPLTNSKGQNCGYRRCRASGVLTTSCGNTLTCYLKAAAACRAAKLQDCTMLVCGDDLVVICESAGTQEDEASLRAFTEAMTRYSAPPGDPPKPEYDLELITSCSSNVSVAHDASGKRVYYLTRDPTTPLARAAWETARHTPVNSWLGNIIMYAPTCWARAILMTHFFSILLAQEQLEKTLDCQIYGACYSIEPLDLPQIIQRLHGLSAFSLHSYSPGEANRVISCLRKLGVPPLRVWRHRARSVRARLLSQGGRAATCGKYLFNWAVRTKLKLTPIPAASQLDLSSWFVAGYSGGDIYHSLSRARPRWFMWCLLLLSVGVGIYLLPNR

SEQ ID NO: 136 - protein, 591 aa, Artificial Sequence
  Synthetic peptid
SMSYTWTGALITPCAAEETKLPINALSNSLLRHHNLVYATTSRSASLRQKKVTFDRLQVLDDHYRDVLKEMKAKASTVKAKLLSVEEACKLTPPHSARSKFGYGAKDVRNLSSKAVNHIRSVWKDLLEDTETPIDTTIMAKNEVFCVQPEKGGRKPARLIVFPDLGVRVCEKMALYDVVSTLPQAVMGSSYGFQYSPGQRVEFLVNAWKAKKCPMGFAYDTRCFDSTVTENDIRVEESIYQCCDLAPEARQAIRSLTERLYIGGPLTNSKGQNCGYRRCRASGVLTTSCGNTLTCYLKAAAACRAAKLQDCTMLVCGDDLVVICESAGTQEDEASLRAFTEAMTRYSAPPGDPPKPEYDLELITSCSSNVSVAHDASGKRVYYLTRDPTTPLARAAWETARHTPVNSWLGNIIMYAPTCWARAILMTHFFSILLAQEQLEKTLDCQIYGACYSIEPLDLPQIIQRLHGLSAFSLHSYSPGEANRVTSCLRKLGVPPLRVWRHRARSVRARLLSQGGRAATCGKYLFNWAVRTKLKLTPIPAASQLDLSSWFVAGYSGGDIYHSLSRARPRWFMWCLLLLSVGVGIYLLPNR

SEQ ID NO: 137 - protein, 591 aa, Artificial Sequence
  Synthetic peptide
SMSYTWTGALITPCAAEETKLPINALSNSLLRHHNLVYATTSRSASLRQKKVTFDRLQVLDDHYRDVLKEMKAKASTVKAKLLSVEEACKLTPPHSARSKFGYGAKDVRNLSSKAVNHIRSVWKDLLEDTETPIDTTIMAKNEVFCVQPEKGGRKPARLIVFPDLGVRVCEKMALYDVVSTLPQAVMGSSYGFQYSPGQRVEFLVNAWKAKKCPMGFAYDTRCFDSTVTENDIRVEESIYQCCDLAPEARQAIRSLTERLYIGGPLTNSKGQNCGYRRCRASGVLTTSCGNTLTCYLKAAAACRAAKLQDCTMLVCGDDLVVICESAGTQEDEASLRAFTEAMTRYSAPPGDPPKPEYDLELITSCSSNVSVAHDASGKRVYYLTRDPTTPLARAAWETARHTPVNSWLGNIIMYAPTCWARAILMTHFFSILLAQEQLEKTLDCQIYGACYSIEPLDLPQIIQRLHGLSAFSLHSYSPGEANRVSSCLRKLGVPPLRVWRHRARSVRARLLSQGGRAATCGKYLFNWAVRTKLKLTPIPAASQLDLSSWFVAGYSGGDIYHSLSRARPRWFMWCLLLLSVGVGIYLLPNR

SEQ ID NO: 138 - protein, 591 aa, Artificial Sequence
  Synthetic peptide
SMSYTWTGALITPCAAEETKLPINALSNSLLRHHNLVYATTSRSASLRQKKVTFDRLQVLDDHYRDVLKEMKAKASTVKAKLLSVEEACKLTPPHSARSKFGYGAKDVRNLSSKAVNHIRSVWKDLLEDTETPIDTTIMAKNEVFCVQPEKGGRKPARLIVFPDLGVRVCEKMALYDVVSTLPQAVMGSSYGFQYSPGQRVEFLVNAWKAKKCPMGFAYDTRCFDSTVTENDIRVEESIYQCCDLAPEARQAIRSLTERLYIGGPLTNSKGQNCGYRRCRASGVLTTSCGNTLTCYLKAAAACRAAKLQDCTMLVCGDDLVVICESAGTQEDEASLRAFTEAMTRYSAPPGDPPKPEYDLELITSCSSNVSVAHDASGKRVYYLTRDPTTPLARAAWETARHTPVNSWLGNIIMYAPTCWARAILMTHFFSILLAQEQLEKTLDCQIYGACYSIEPLDLPQIIQRLHGLSAFSLHSYSPGEANRVVSCLRKLGIPPLRVWRHRARSVRARLLSQGGRAATCGKYLFNWAVRTKLKLTPIPAASQLDLSSWFVAGYSGGDIYHSLSRARPRWFMWCLLLLSVGVGIYLLPNR

SEQ ID NO: 139 - protein, 591 aa, Artificial Sequence; identical to SEQ ID NO: 138
  Synthetic peptide

SEQ ID NO: 140 - protein, 591 aa, Artificial Sequence
  Synthetic peptide
SMSYTWTGALITPCAAEETKLPINALSNSLLRHHNLVYATTSRSASLRQKKVTFDRLQVLDDHYRDVLKEMKAKASTVKAKLLSVEEACKLTPPHSARSKFGYGAKDVRNLSSKAVNHIRSVWKDLLEDTETPIDTTIMAKNEVFCVQPEKGGRKPARLIVFPDLGVRVCEKMALYDVVSTLPQAVMGSSYGFQYSPGQRVEFLVNAWKAKKCPMGFAYDTRCFDSTVTENDIRVEESIYQCCDLAPEARQAIRSLTERLYIGGPLTNSKGQNCGYRRCRASGVLTTSCGNTLTCYLKAAAACRAAKLQDCTMLVCGDDLVVICESAGTQEDEASLRAFTEAMTRYSAPPGDPPKPEYDLELITSCSSNVSVAHDASGKRVYYLTRDPTTPLARAAWETARHTPVNSWLGNIIMYAPTCWARAILMTHFFSILLAQEQLEKTLDCQIYGACYSIEPLDLPQIIQRLHGLSAFSLHSYSPGEANRVISCLRKLGIPPLRVWRHRARSVRARLLSQGGRAATCGKYLFNWAVRTKLKLTPIPAASQLDLSSWFVAGYSGGDIYHSLSRARPRWFMWCLLLLSVGVGIYLLPNR

SEQ ID NO: 141 - protein, 591 aa, Artificial Sequence
  Synthetic peptide
SMSYTWTGALITPCAAEETKLPINALSNSLLRHHNLVYATTSRSASLRQKKVTFDRLQVLDDHYRDVLKEMKAKASTVKAKLLSVEEACKLTPPHSARSKFGYGAKDVRNLSSKAVNHIRSVWKDLLEDTETPIDTTIMAKNEVFCVQPEKGGRKPARLIVFPDLGVRVCEKMALYDVVSTLPQAVMGSSYGFQYSPGQRVEFLVNAWKAKKCPMGFAYDTRCFDSTVTENDIRVEESIYQCCDLAPEARQAIRSLTERLYIGGPLTNSKGQNCGYRRCRASGVLTTSCGNTLTCYLKAAAACRAAKLQDCTMLVCGDDLVVICESAGTQEDEASLRAFTEAMTRYSAPPGDPPKPEYDLELITSCSSNVSVAHDASGKRVYYLTRDPTTPLARAAWETARHTPVNSWLGNIIMYAPTCWARAILMTHFFSILLAQEQLEKTLDCQIYGACYSIEPLDLPQIIQRLHGLSAFSLHSYSPGEANRVTSCLRKLGIPPLRVWRHRARSVRARLLSQGGRAATCGKYLFNWAVRTKLKLTPIPAASQLDLSSWFVAGYSGGDIYHSLSRARPRWFMWCLLLLSVGVGIYLLPNR

SEQ ID NO: 142 - protein, 591 aa, Artificial Sequence
  Synthetic peptide
SMSYTWTGALITPCAAEETKLPINALSNSLLRHHNLVYATTSRSASLRQKKVTFDRLQVLDDHYRDVLKEMKAKASTVKAKLLSVEEACKLTPPHSARSKFGYGAKDVRNLSSKAVNHIRSVWKDLLEDTETPIDTTIMAKNEVFCVQPEKGGRKPARLIVFPDLGVRVCEKMALYDVVSTLPQAVMGSSYGFQYSPGQRVEFLVNAWKAKKCPMGFAYDTRCFDSTVTENDIRVEESIYQCCDLAPEARQAIRSLTERLYIGGPLTNSKGQNCGYRRCRASGVLTTSCGNTLTCYLKAAAACRAAKLQDCTMLVCGDDLVVICESAGTQEDEASLRAFTEAMTRYSAPPGDPPKPEYDLELITSCSSNVSVAHDASGKRVYYLTRDPTTPLARAAWETARHTPVNSWLGNIIMYAPTCWARAILMTHFFSILLAQEQLEKTLDCQIYGACYSIEPLDLPQIIQRLHGLSAFSLHSYSPGEANRVSSCLRKLGIPPLRVWRHRARSVRARLLSQGGRAATCGKYLFNWAVRTKLKLTPIPAASQLDLSSWFVAGYSGGDIYHSLSRARPRWFMWCLLLLSVGVGIYLLPNR

SEQ ID NO: 143 - protein, 591 aa, Artificial Sequence
  Synthetic peptide
SMSYTWTGALITPCAAEETKLPINALSNSLLRHHNLVYATTSRSASLRQKKVTFDRLQVLDDHYRDVLKEMKAKASTVKAKLLSVEEACKLTPPHSARSKFGYGAKDVRNLSSKAVNHIRSVWKDLLEDTETPIDTTIMAKNEVFCVQPEKGGRKPARLIVFPDLGVRVCEKMALYDVVSTLPQAVMGSSYGFQYSPGQRVEFLVNAWKAKKCPMGFAYDTRCFDSTVTENDIRVEESIYQCCDLAPEARQAIRSLTERLYIGGPLTNSKGQNCGYRRCRASGVLTTSCGNTLTCYLKAAAACRAAKLQDCTMLVCGDDLVVICESAGTQEDEASLRAFTEAMTRYSAPPGDPPKPEYDLELITSCSSNVSVAHDASGKRVYYLTRDPTTPLARAAWETARHTPVNSWLGNIIMYAPTCWARMILMTHFFSILLAQEQLEKTLDCQIYGACYSIEPLDLPQIIQRLHGLSAFSLHSYSPGETNRVASCLRKLGVPPLRVWRHRARSVRARLLSQGGRAATCGKYLFNWAVRTKLKLTPIPAASQLDLSSWFVAGYSGGDIYHSLSRARPRWFMWCLLLLSVGVGIYLLPNR

SEQ ID NO: 144 - protein, 591 aa, Artificial Sequence
  Synthetic peptide
SMSYTWTGALITPCAAEETKLPINALSNSLLRHHNLVYATTSRSASLRQKKVTFDRLQVLDDHYRDVLKEMKAKASTVKAKLLSVEEACKLTPPHSARSKFGYGAKDVRNLSSKAVNHIRSVWKDLLEDTETPIDTTIMAKNEVFCVQPEKGGRKPARLIVFPDLGVRVCEKMALYDVVSTLPQAVMGSSYGFQYSPGQRVEFLVNAWKAKKCPMGFAYDTRCFDSTVTENDIRVEESIYQCCDLAPEARQAIRSLTERLYIGGPLTNSKGQNCGYRRCRASGVLTTSCGNTLTCYLKAAAACRAAKLQDCTMLVCGDDLVVICESAGTQEDEASLRAFTEAMTRYSAPPGDPPKPEYDLELITSCSSNVSVAHDASGKRVYYLTRDPTTPLARAAWETARHTPVNSWLGNIIMYAPTCWARMILMTHFFSILLAQEQLEKTLDCQIYGACYSIEPLDLPQIIQRLHGLSAFSLHSYSPGETNRVVSCLRKLGVPPLRVWRHRARSVRARLLSQGGRAATCGKYLFNWAVRTKLKLTPIPAASQLDLSSWFVAGYSGGDIYHSLSRARPRWFMWCLLLLSVGVGIYLLPNR

SEQ ID NO: 145 - protein, 591 aa, Artificial Sequence
  Synthetic peptide
SMSYTWTGALITPCAAEETKLPINALSNSLLRHHNLVYATTSRSASLRQKKVTFDRLQVLDDHYRDVLKEMKAKASTVKAKLLSVEEACKLTPPHSARSKFGYGAKDVRNLSSKAVNHIRSVWKDLLEDTETPIDTTIMAKNEVFCVQPEKGGRKPARLIVFPDLGVRVCEKMALYDVVSTLPQAVMGSSYGFQYSPGQRVEFLVNAWKAKKCPMGFAYDTRCFDSTVTENDIRVEESIYQCCDLAPEARQAIRSLTERLYIGGPLTNSKGQNCGYRRCRASGVLTTSCGNTLTCYLKAAAACRAAKLQDCTMLVCGDDLVVICESAGTQEDEASLRAFTEAMTRYSAPPGDPPKPEYDLELITSCSSNVSVAHDASGKRVYYLTRDPTTPLARAAWETARHTPVNSWLGNIIMYAPTCWARMILMTHFFSILLAQEQLEKTLDCQIYGACYSIEPLDLPQIIQRLHGLSAFSLHSYSPGETNRVISCLRKLGVPPLRVWRHRARSVRARLLSQGGRAATCGKYLFNWAVRTKLKLTPIPAASQLDLSSWFVAGYSGGDIYHSLSRARPRWFMWCLLLLSVGVGIYLLPNR

SEQ ID NO: 146 - protein, 591 aa, Artificial Sequence
  Synthetic peptide
SMSYTWTGALITPCAAEETKLPINALSNSLLRHHNLVYATTSRSASLRQKKVTFDRLQVLDDHYRDVLKEMKAKASTVKAKLLSVEEACKLTPPHSARSKFGYGAKDVRNLSSKAVNHIRSVWKDLLEDTETPIDTTIMAKNEVFCVQPEKGGRKPARLIVFPDLGVRVCEKMALYDVVSTLPQAVMGSSYGFQYSPGQRVEFLVNAWKAKKCPMGFAYDTRCFDSTVTENDIRVEESIYQCCDLAPEARQAIRSLTERLYIGGPLTNSKGQNCGYRRCRASGVLTTSCGNTLTCYLKAAAACRAAKLQDCTMLVCGDDLVVICESAGTQEDEASLRAFTEAMTRYSAPPGDPPKPEYDLELITSCSSNVSVAHDASGKRVYYLTRDPTTPLARAAWETARHTPVNSWLGNIIMYAPTCWARMILMTHFFSILLAQEQLEKTLDCQIYGACYSIEPLDLPQIIQRLHGLSAFSLHSYSPGETNRVTSCLRKLGVPPLRVWRHRARSVRARLLSQGGRAATCGKYLFNWAVRTKLKLTPIPAASQLDLSSWFVAGYSGGDIYHSLSRARPRWFMWCLLLLSVGVGIYLLPNR

SEQ ID NO: 147 - protein, 591 aa, Artificial Sequence
  Synthetic peptide
SMSYTWTGALITPCAAEETKLPINALSNSLLRHHNLVYATTSRSASLRQKKVTFDRLQVLDDHYRDVLKEMKAKASTVKAKLLSVEEACKLTPPHSARSKFGYGAKDVRNLSSKAVNHIRSVWKDLLEDTETPIDTTIMAKNEVFCVQPEKGGRKPARLIVFPDLGVRVCEKMALYDVVSTLPQAVMGSSYGFQYSPGQRVEFLVNAWKAKKCPMGFAYDTRCFDSTVTENDIRVEESIYQCCDLAPEARQAIRSLTERLYIGGPLTNSKGQNCGYRRCRASGVLTTSCGNTLTCYLKAAAACRAAKLQDCTMLVCGDDLVVICESAGTQEDEASLRAFTEAMTRYSAPPGDPPKPEYDLELITSCSSNVSVAHDASGKRVYYLTRDPTTPLARAAWETARHTPVNSWLGNIIMYAPTCWARMILMTHFFSILLAQEQLEKTLDCQIYGACYSIEPLDLPQIIQRLHGLSAFSLHSYSPGETNRVSSCLRKLGVPPLRVWRHRARSVRARLLSQGGRAATCGKYLFNWAVRTKLKLTPIPAASQLDLSSWFVAGYSGGDIYHSLSRARPRWFMWCLLLLSVGVGIYLLPNR

SEQ ID NO: 148 - protein, 591 aa, Artificial Sequence
  Synthetic peptide
SMSYTWTGALITPCAAEETKLPINALSNSLLRHHNLVYATTSRSASLRQKKVTFDRLQVLDDHYRDVLKEMKAKASTVKAKLLSVEEACKLTPPHSARSKFGYGAKDVRNLSSKAVNHIRSVWKDLLEDTETPIDTTIMAKNEVFCVQPEKGGRKPARLIVFPDLGVRVCEKMALYDVVSTLPQAVMGSSYGFQYSPGQRVEFLVNAWKAKKCPMGFAYDTRCFDSTVTENDIRVEESIYQCCDLAPEARQAIRSLTERLYIGGPLTNSKGQNCGYRRCRASGVLTTSCGNTLTCYLKAAAACRAAKLQDCTMLVCGDDLVVICESAGTQEDEASLRAFTEAMTRYSAPPGDPPKPEYDLELITSCSSNVSVAHDASGKRVYYLTRDPTTPLARAAWETARHTPVNSWLGNIIMYAPTCWARMILMTHFFSILLAQEQLEKTLDCQIYGACYSIEPLDLPQIIQRLHGLSAFSLHSYSPGETNRVASCLRKLGIPPLRVWRHRARSVRARLLSQGGRAATCGKYLFNWAVRTKLKLTPIPAASQLDLSSWFVAGYSGGDIYHSLSRARPRWFMWCLLLLSVGVGIYLLPNR

SEQ ID NO: 149 - protein, 591 aa, Artificial Sequence
  Synthetic peptide
SMSYTWTGALITPCAAEETKLPINALSNSLLRHHNLVYATTSRSASLRQKKVTFDRLQVLDDHYRDVLKEMKAKASTVKAKLLSVEEACKLTPPHSARSKFGYGAKDVRNLSSKAVNHIRSVWKDLLEDTETPIDTTIMAKNEVFCVQPEKGGRKPARLIVFPDLGVRVCEKMALYDVVSTLPQAVMGSSYGFQYSPGQRVEFLVNAWKAKKCPMGFAYDTRCFDSTVTENDIRVEESIYQCCDLAPEARQAIRSLTERLYIGGPLTNSKGQNCGYRRCRASGVLTTSCGNTLTCYLKAAAACRAAKLQDCTMLVCGDDLVVICESAGTQEDEASLRAFTEAMTRYSAPPGDPPKPEYDLELITSCSSNVSVAHDASGKRVYYLTRDPTTPLARAAWETARHTPVNSWLGNIIMYAPTCWARMILMTHFFSILLAQEQLEKTLDCQIYGACYSIEPLDLPQIIQRLHGLSAFSLHSYSPGETNRVVSCLRKLGIPPLRVWRHRARSVRARLLSQGGRAATCGKYLFNWAVRTKLKLTPIPAASQLDLSSWFVAGYSGGDIYHSLSRARPRWFMWCLLLLSVGVGIYLLPNR

SEQ ID NO: 150 - protein, 591 aa, Artificial Sequence
  Synthetic peptide
SMSYTWTGALITPCAAEETKLPINALSNSLLRHHNLVYATTSRSASLRQKKVTFDRLQVLDDHYRDVLKEMKAKASTVKAKLLSVEEACKLTPPHSARSKFGYGAKDVRNLSSKAVNHIRSVWKDLLEDTETPIDTTIMAKNEVFCVQPEKGGRKPARLIVFPDLGVRVCEKMALYDVVSTLPQAVMGSSYGFQYSPGQRVEFLVNAWKAKKCPMGFAYDTRCFDSTVTENDIRVEESIYQCCDLAPEARQAIRSLTERLYIGGPLTNSKGQNCGYRRCRASGVLTTSCGNTLTCYLKAAAACRAAKLQDCTMLVCGDDLVVICESAGTQEDEASLRAFTEAMTRYSAPPGDPPKPEYDLELITSCSSNVSVAHDASGKRVYYLTRDPTTPLARAAWETARHTPVNSWLGNIIMYAPTCWARMILMTHFFSILLAQEQLEKTLDCQIYGACYSIEPLDLPQIIQRLHGLSAFSLHSYSPGETNRVISCLRKLGIPPLRVWRHRARSVRARLLSQGGRAATCGKYLFNWAVRTKLKLTPIPAASQLDLSSWFVAGYSGGDIYHSLSRARPRWFMWCLLLLSVGVGIYLLPNR

SEQ ID NO: 151 - protein, 591 aa, Artificial Sequence
  Synthetic peptide
SMSYTWTGALITPCAAEETKLPINALSNSLLRHHNLVYATTSRSASLRQKKVTFDRLQVLDDHYRDVLKEMKAKASTVKAKLLSVEEACKLTPPHSARSKFGYGAKDVRNLSSKAVNHIRSVWKDLLEDTETPIDTTIMAKNEVFCVQPEKGGRKPARLIVFPDLGVRVCEKMALYDVVSTLPQAVMGSSYGFQYSPGQRVEFLVNAWKAKKCPMGFAYDTRCFDSTVTENDIRVEESIYQCCDLAPEARQAIRSLTERLYIGGPLTNSKGQNCGYRRCRASGVLTTSCGNTLTCYLKAAAACRAAKLQDCTMLVCGDDLVVICESAGTQEDEASLRAFTEAMTRYSAPPGDPPKPEYDLELITSCSSNVSVAHDASGKRVYYLTRDPTTPLARAAWETARHTPVNSWLGNIIMYAPTCWARMILMTHFFSILLAQEQLEKTLDCQIYGACYSIEPLDLPQIIQRLHGLSAFSLHSYSPGETNRVTSCLRKLGIPPLRVWRHRARSVRARLLSQGGRAATCGKYLFNWAVRTKLKLTPIPAASQLDLSSWFVAGYSGGDIYHSLSRARPRWFMWCLLLLSVGVGIYLLPNR

SEQ ID NO: 152 - protein, 591 aa, Artificial Sequence
  Synthetic peptide
SMSYTWTGALITPCAAEETKLPINALSNSLLRHHNLVYATTSRSASLRQKKVTFDRLQVLDDHYRDVLKEMKAKASTVKAKLLSVEEACKLTPPHSARSKFGYGAKDVRNLSSKAVNHIRSVWKDLLEDTETPIDTTIMAKNEVFCVQPEKGGRKPARLIVFPDLGVRVCEKMALYDVVSTLPQAVMGSSYGFQYSPGQRVEFLVNAWKAKKCPMGFAYDTRCFDSTVTENDIRVEESIYQCCDLAPEARQAIRSLTERLYIGGPLTNSKGQNCGYRRCRASGVLTTSCGNTLTCYLKAAAACRAAKLQDCTMLVCGDDLVVICESAGTQEDEASLRAFTEAMTRYSAPPGDPPKPEYDLELITSCSSNVSVAHDASGKRVYYLTRDPTTPLARAAWETARHTPVNSWLGNIIMYAPTCWARMILMTHFFSILLAQEQLEKTLDCQIYGACYSIEPLDLPQIIQRLHGLSAFSLHSYSPGETNRVSSCLRKLGIPPLRVWRHRARSVRARLLSQGGRAATCGKYLFNWAVRTKLKLTPIPAASQLDLSSWFVAGYSGGDIYHSLSRARPRWFMWCLLLLSVGVGIYLLPNR

SEQ ID NO: 153 - protein, 591 aa, Artificial Sequence
  Synthetic peptid
SMSYTWTGALITPCAAEETKLPINALSNSLLRHHNLVYATTSRSASLRQKKVTFDRLQVLDDHYRDVLKEMKAKASTVKAKLLSVEEACKLTPPHSARSKFGYGAKDVRNLSSKAVNHIRSVWKDLLEDTETPIDTTIMAKNEVFCVQPEKGGRKPARLIVFPDLGVRVCEKMALYDVVSTLPQAVMGSSYGFQYSPGQRVEFLVNAWKAKKCPMGFAYDTRCFDSTVTENDIRVEESIYQCCDLAPEARQAIRSLTERLYIGGPLTNSKGQNCGYRRCRASGVLTTSCGNTLTCYLKAAAACRAAKLQDCTMLVCGDDLVVICESAGTQEDEASLRAFTEAMTRYSAPPGDPPKPEYDLELITSCSSNVSVAHDASGKRVYYLTRDPTTPLARAAWETARHTPVNSWLGNIIMYAPTCWARAILMTHFFSILLAQEQLEKTLDCQIYGACYSIEPLDLPQIIQRLHGLSAFSLHSYSPGETNRVASCLRKLGVPPLRVWRHRARSVRARLLSQGGRAATCGKYLFNWAVRTKLKLTPIPAASQLDLSSWFVAGYSGGDIYHSLSRARPRWFMWCLLLLSVGVGIYLLPNR

SEQ ID NO: 154 - protein, 591 aa, Artificial Sequence
  Synthetic peptide
SMSYTWTGALITPCAAEETKLPINALSNSLLRHHNLVYATTSRSASLRQKKVTFDRLQVLDDHYRDVLKEMKAKASTVKAKLLSVEEACKLTPPHSARSKFGYGAKDVRNLSSKAVNHIRSVWKDLLEDTETPIDTTIMAKNEVFCVQPEKGGRKPARLIVFPDLGVRVCEKMALYDVVSTLPQAVMGSSYGFQYSPGQRVEFLVNAWKAKKCPMGFAYDTRCFDSTVTENDIRVEESIYQCCDLAPEARQAIRSLTERLYIGGPLTNSKGQNCGYRRCRASGVLTTSCGNTLTCYLKAAAACRAAKLQDCTMLVCGDDLVVICESAGTQEDEASLRAFTEAMTRYSAPPGDPPKPEYDLELITSCSSNVSVAHDASGKRVYYLTRDPTTPLARAAWETARHTPVNSWLGNIIMYAPTCWARAILMTHFFSILLAQEQLEKTLDCQIYGACYSIEPLDLPQIIQRLHGLSAFSLHSYSPGETNRVVSCLRKLGVPPLRVWRHRARSVRARLLSQGGRAATCGKYLFNWAVRTKLKLTPIPAASQLDLSSWFVAGYSGGDIYHSLSRARPRWFMWCLLLLSVGVGIYLLPNR

SEQ ID NO: 155 - protein, 591 aa, Artificial Sequence
  Synthetic peptide
SMSYTWTGALITPCAAEETKLPINALSNSLLRHHNLVYATTSRSASLRQKKVTFDRLQVLDDHYRDVLKEMKAKASTVKAKLLSVEEACKLTPPHSARSKFGYGAKDVRNLSSKAVNHIRSVWKDLLEDTETPIDTTIMAKNEVFCVQPEKGGRKPARLIVFPDLGVRVCEKMALYDVVSTLPQAVMGSSYGFQYSPGQRVEFLVNAWKAKKCPMGFAYDTRCFDSTVTENDIRVEESIYQCCDLAPEARQAIRSLTERLYIGGPLTNSKGQNCGYRRCRASGVLTTSCGNTLTCYLKAAAACRAAKLQDCTMLVCGDDLVVICESAGTQEDEASLRAFTEAMTRYSAPPGDPPKPEYDLELITSCSSNVSVAHDASGKRVYYLTRDPTTPLARAAWETARHTPVNSWLGNIIMYAPTCWARAILMTHFFSILLAQEQLEKTLDCQIYGACYSIEPLDLPQIIQRLHGLSAFSLHSYSPGETNRVISCLRKLGVPPLRVWRHRARSVRARLLSQGGRAATCGKYLFNWAVRTKLKLTPIPAASQLDLSSWFVAGYSGGDIYHSLSRARPRWFMWCLLLLSVGVGIYLLPNR

SEQ ID NO: 156 - protein, 591 aa, Artificial Sequence
  Synthetic peptide
SMSYTWTGALITPCAAEETKLPINALSNSLLRHHNLVYATTSRSASLRQKKVTFDRLQVLDDHYRDVLKEMKAKASTVKAKLLSVEEACKLTPPHSARSKFGYGAKDVRNLSSKAVNHIRSVWKDLLEDTETPIDTTIMAKNEVFCVQPEKGGRKPARLIVFPDLGVRVCEKMALYDVVSTLPQAVMGSSYGFQYSPGQRVEFLVNAWKAKKCPMGFAYDTRCFDSTVTENDIRVEESIYQCCDLAPEARQAIRSLTERLYIGGPLTNSKGQNCGYRRCRASGVLTTSCGNTLTCYLKAAAACRAAKLQDCTMLVCGDDLVVICESAGTQEDEASLRAFTEAMTRYSAPPGDPPKPEYDLELITSCSSNVSVAHDASGKRVYYLTRDPTTPLARAAWETARHTPVNSWLGNIIMYAPTCWARAILMTHFFSILLAQEQLEKTLDCQIYGACYSIEPLDLPQIIQRLHGLSAFSLHSYSPGETNRVTSCLRKLGVPPLRVWRHRARSVRARLLSQGGRAATCGKYLFNWAVRTKLKLTPIPAASQLDLSSWFVAGYSGGDIYHSLSRARPRWFMWCLLLLSVGVGIYLLPNR

SEQ ID NO: 157 - protein, 591 aa, Artificial Sequence
  Synthetic peptide
SMSYTWTGALITPCAAEETKLPINALSNSLLRHHNLVYATTSRSASLRQKKVTFDRLQVLDDHYRDVLKEMKAKASTVKAKLLSVEEACKLTPPHSARSKFGYGAKDVRNLSSKAVNHIRSVWKDLLEDTETPIDTTIMAKNEVFCVQPEKGGRKPARLIVFPDLGVRVCEKMALYDVVSTLPQAVMGSSYGFQYSPGQRVEFLVNAWKAKKCPMGFAYDTRCFDSTVTENDIRVEESIYQCCDLAPEARQAIRSLTERLYIGGPLTNSKGQNCGYRRCRASGVLTTSCGNTLTCYLKAAAACRAAKLQDCTMLVCGDDLVVICESAGTQEDEASLRAFTEAMTRYSAPPGDPPKPEYDLELITSCSSNVSVAHDASGKRVYYLTRDPTTPLARAAWETARHTPVNSWLGNIIMYAPTCWARAILMTHFFSILLAQEQLEKTLDCQIYGACYSIEPLDLPQIIQRLHGLSAFSLHSYSPGETNRVSSCLRKLGVPPLRVWRHRARSVRARLLSQGGRAATCGKYLFNWAVRTKLKLTPIPAASQLDLSSWFVAGYSGGDIYHSLSRARPRWFMWCLLLLSVGVGIYLLPNR

SEQ ID NO: 158 - protein, 591 aa, Artificial Sequence
  Synthetic peptide
SMSYTWTGALITPCAAEETKLPINALSNSLLRHHNLVYATTSRSASLRQKKVTFDRLQVLDDHYRDVLKEMKAKASTVKAKLLSVEEACKLTPPHSARSKFGYGAKDVRNLSSKAVNHIRSVWKDLLEDTETPIDTTIMAKNEVFCVQPEKGGRKPARLIVFPDLGVRVCEKMALYDVVSTLPQAVMGSSYGFQYSPGQRVEFLVNAWKAKKCPMGFAYDTRCFDSTVTENDIRVEESIYQCCDLAPEARQAIRSLTERLYIGGPLTNSKGQNCGYRRCRASGVLTTSCGNTLTCYLKAAAACRAAKLQDCTMLVCGDDLVVICESAGTQEDEASLRAFTEAMTRYSAPPGDPPKPEYDLELITSCSSNVSVAHDASGKRVYYLTRDPTTPLARAAWETARHTPVNSWLGNIIMYAPTCWARAILMTHFFSILLAQEQLEKTLDCQIYGACYSIEPLDLPQIIQRLHGLSAFSLHSYSPGETNRVASCLRKLGIPPLRVWRHRARSVRARLLSQGGRAATCGKYLFNWAVRTKLKLTPIPAASQLDLSSWFVAGYSGGDIYHSLSRARPRWFMWCLLLLSVGVGIYLLPNR

SEQ ID NO: 159 - protein, 591 aa, Artificial Sequence
  Synthetic peptide
SMSYTWTGALITPCAAEETKLPINALSNSLLRHHNLVYATTSRSASLRQKKVTFDRLQVLDDHYRDVLKEMKAKASTVKAKLLSVEEACKLTPPHSARSKFGYGAKDVRNLSSKAVNHIRSVWKDLLEDTETPIDTTIMAKNEVFCVQPEKGGRKPARLIVFPDLGVRVCEKMALYDVVSTLPQAVMGSSYGFQYSPGQRVEFLVNAWKAKKCPMGFAYDTRCFDSTVTENDIRVEESIYQCCDLAPEARQAIRSLTERLYIGGPLTNSKGQNCGYRRCRASGVLTTSCGNTLTCYLKAAAACRAAKLQDCTMLVCGDDLVVICESAGTQEDEASLRAFTEAMTRYSAPPGDPPKPEYDLELITSCSSNVSVAHDASGKRVYYLTRDPTTPLARAAWETARHTPVNSWLGNIIMYAPTCWARAILMTHFFSILLAQEQLEKTLDCQIYGACYSIEPLDLPQIIQRLHGLSAFSLHSYSPGETNRVVSCLRKLGIPPLRVWRHRARSVRARLLSQGGRAATCGKYLFNWAVRTKLKLTPIPAASQLDLSSWFVAGYSGGDIYHSLSRARPRWFMWCLLLLSVGVGIYLLPNR

SEQ ID NO: 160 - protein, 591 aa, Artificial Sequence
  Synthetic peptide
SMSYTWTGALITPCAAEETKLPINALSNSLLRHHNLVYATTSRSASLRQKKVTFDRLQVLDDHYRDVLKEMKAKASTVKAKLLSVEEACKLTPPHSARSKFGYGAKDVRNLSSKAVNHIRSVWKDLLEDTETPIDTTIMAKNEVFCVQPEKGGRKPARLIVFPDLGVRVCEKMALYDVVSTLPQAVMGSSYGFQYSPGQRVEFLVNAWKAKKCPMGFAYDTRCFDSTVTENDIRVEESIYQCCDLAPEARQAIRSLTERLYIGGPLTNSKGQNCGYRRCRASGVLTTSCGNTLTCYLKAAAACRAAKLQDCTMLVCGDDLVVICESAGTQEDEASLRAFTEAMTRYSAPPGDPPKPEYDLELITSCSSNVSVAHDASGKRVYYLTRDPTTPLARAAWETARHTPVNSWLGNIIMYAPTCWARAILMTHFFSILLAQEQLEKTLDCQIYGACYSIEPLDLPQIIQRLHGLSAFSLHSYSPGETNRVISCLRKLGIPPLRVWRHRARSVRARLLSQGGRAATCGKYLFNWAVRTKLKLTPIPAASQLDLSSWFVAGYSGGDIYHSLSRARPRWFMWCLLLLSVGVGIYLLPNR

SEQ ID NO: 161 - protein, 591 aa, Artificial Sequence
  Synthetic peptide
SMSYTWTGALITPCAAEETKLPINALSNSLLRHHNLVYATTSRSASLRQKKVTFDRLQVLDDHYRDVLKEMKAKASTVKAKLLSVEEACKLTPPHSARSKFGYGAKDVRNLSSKAVNHIRSVWKDLLEDTETPIDTTIMAKNEVFCVQPEKGGRKPARLIVFPDLGVRVCEKMALYDVVSTLPQAVMGSSYGFQYSPGQRVEFLVNAWKAKKCPMGFAYDTRCFDSTVTENDIRVEESIYQCCDLAPEARQAIRSLTERLYIGGPLTNSKGQNCGYRRCRASGVLTTSCGNTLTCYLKAAAACRAAKLQDCTMLVCGDDLVVICESAGTQEDEASLRAFTEAMTRYSAPPGDPPKPEYDLELITSCSSNVSVAHDASGKRVYYLTRDPTTPLARAAWETARHTPVNSWLGNIIMYAPTCWARAILMTHFFSILLAQEQLEKTLDCQIYGACYSIEPLDLPQIIQRLHGLSAFSLHSYSPGETNRVTSCLRKLGIPPLRVWRHRARSVRARLLSQGGRAATCGKYLFNWAVRTKLKLTPIPAASQLDLSSWFVAGYSGGDIYHSLSRARPRWFMWCLLLLSVGVGIYLLPNR

SEQ ID NO: 162 - protein, 591 aa, Artificial Sequence
  Synthetic peptide
SMSYTWTGALITPCAAEETKLPINALSNSLLRHHNLVYATTSRSASLRQKKVTFDRLQVLDDHYRDVLKEMKAKASTVKAKLLSVEEACKLTPPHSARSKFGYGAKDVRNLSSKAVNHIRSVWKDLLEDTETPIDTTIMAKNEVFCVQPEKGGRKPARLIVFPDLGVRVCEKMALYDVVSTLPQAVMGSSYGFQYSPGQRVEFLVNAWKAKKCPMGFAYDTRCFDSTVTENDIRVEESIYQCCDLAPEARQAIRSLTERLYIGGPLTNSKGQNCGYRRCRASGVLTTSCGNTLTCYLKAAAACRAAKLQDCTMLVCGDDLVVICESAGTQEDEASLRAFTEAMTRYSAPPGDPPKPEYDLELITSCSSNVSVAHDASGKRVYYLTRDPTTPLARAAWETARHTPVNSWLGNIIMYAPTCWARAILMTHFFSILLAQEQLEKTLDCQIYGACYSIEPLDLPQIIQRLHGLSAFSLHSYSPGETNRVSSCLRKLGIPPLRVWRHRARSVRARLLSQGGRAATCGKYLFNWAVRTKLKLTPIPAASQLDLSSWFVAGYSGGDIYHSLSRARPRWFMWCLLLLSVGVGIYLLPNR

SEQ ID NO: 163 - protein, 591 aa, Artificial Sequence
  Synthetic peptide
SMSYTWTGALITPCAAEETKLPINALSNSLLRHHNLVYATTSRSASLRQKKVTFDRLQVLDDHYRDVLKEMKAKASTVKAKLLSVEEACKLTPPHSARSKFGYGAKDVRNLSSKAVNHIRSVWKDLLEDTETPIDTTIMAKNEVFCVQPEKGGRKPARLIVFPDLGVRVCEKMALYDVVSTLPQAVMGSSYGFQYSPGQRVEFLVNAWKAKKCPMGFAYDTRCFDSTVTENDIRVEESIYQCCDLAPEARQAIRSLTERLYIGGPLTNSKGQNCGYRRCRASGVLTTSCGNTLTCYLKAAAACRAAKLQDCTMLVCGDDLVVICESAGTQEDEASLRAFTEAMTRYSAPPGDPPKPEYDLELITSCSSNVSVAHDASGKRVYYLTRDPTTPLARAAWETARHTPVNSWLGNIIMYAPTCWARMILMTHFFSILLAQEQLEKTLDCQIYGACYSIEPLDLPQIIQRLHGLSAFSLHSYSPGEVNRVASCLRKLGVPPLRVWRHRARSVRARLLSQGGRAATCGKYLFNWAVRTKLKLTPIPAASQLDLSSWFVAGYSGGDIYHSLSRARPRWFMWCLLLLSVGVGIYLLPNR

SEQ ID NO: 164 - protein, 591 aa, Artificial Sequence
  Synthetic peptid
SMSYTWTGALITPCAAEETKLPINALSNSLLRHHNLVYATTSRSASLRQKKVTFDRLQVLDDHYRDVLKEMKAKASTVKAKLLSVEEACKLTPPHSARSKFGYGAKDVRNLSSKAVNHIRSVWKDLLEDTETPIDTTIMAKNEVFCVQPEKGGRKPARLIVFPDLGVRVCEKMALYDVVSTLPQAVMGSSYGFQYSPGQRVEFLVNAWKAKKCPMGFAYDTRCFDSTVTENDIRVEESIYQCCDLAPEARQAIRSLTERLYIGGPLTNSKGQNCGYRRCRASGVLTTSCGNTLTCYLKAAAACRAAKLQDCTMLVCGDDLVVICESAGTQEDEASLRAFTEAMTRYSAPPGDPPKPEYDLELITSCSSNVSVAHDASGKRVYYLTRDPTTPLARAAWETARHTPVNSWLGNIIMYAPTCWARMILMTHFFSILLAQEQLEKTLDCQIYGACYSIEPLDLPQIIQRLHGLSAFSLHSYSPGEVNRVVSCLRKLGVPPLRVWRHRARSVRARLLSQGGRAATCGKYLFNWAVRTKLKLTPIPAASQLDLSSWFVAGYSGGDIYHSLSRARPRWFMWCLLLLSVGVGIYLLPNR

SEQ ID NO: 165 - protein, 591 aa, Artificial Sequence
  Synthetic peptide
SMSYTWTGALITPCAAEETKLPINALSNSLLRHHNLVYATTSRSASLRQKKVTFDRLQVLDDHYRDVLKEMKAKASTVKAKLLSVEEACKLTPPHSARSKFGYGAKDVRNLSSKAVNHIRSVWKDLLEDTETPIDTTIMAKNEVFCVQPEKGGRKPARLIVFPDLGVRVCEKMALYDVVSTLPQAVMGSSYGFQYSPGQRVEFLVNAWKAKKCPMGFAYDTRCFDSTVTENDIRVEESIYQCCDLAPEARQAIRSLTERLYIGGPLTNSKGQNCGYRRCRASGVLTTSCGNTLTCYLKAAAACRAAKLQDCTMLVCGDDLVVICESAGTQEDEASLRAFTEAMTRYSAPPGDPPKPEYDLELITSCSSNVSVAHDASGKRVYYLTRDPTTPLARAAWETARHTPVNSWLGNIIMYAPTCWARMILMTHFFSILLAQEQLEKTLDCQIYGACYSIEPLDLPQIIQRLHGLSAFSLHSYSPGEVNRVISCLRKLGVPPLRVWRHRARSVRARLLSQGGRAATCGKYLFNWAVRTKLKLTPIPAASQLDLSSWFVAGYSGGDIYHSLSRARPRWFMWCLLLLSVGVGIYLLPNR

SEQ ID NO: 166 - protein, 591 aa, Artificial Sequence
  Synthetic peptide
SMSYTWTGALITPCAAEETKLPINALSNSLLRHHNLVYATTSRSASLRQKKVTFDRLQVLDDHYRDVLKEMKAKASTVKAKLLSVEEACKLTPPHSARSKFGYGAKDVRNLSSKAVNHIRSVWKDLLEDTETPIDTTIMAKNEVFCVQPEKGGRKPARLIVFPDLGVRVCEKMALYDVVSTLPQAVMGSSYGFQYSPGQRVEFLVNAWKAKKCPMGFAYDTRCFDSTVTENDIRVEESIYQCCDLAPEARQAIRSLTERLYIGGPLTNSKGQNCGYRRCRASGVLTTSCGNTLTCYLKAAAACRAAKLQDCTMLVCGDDLVVICESAGTQEDEASLRAFTEAMTRYSAPPGDPPKPEYDLELITSCSSNVSVAHDASGKRVYYLTRDPTTPLARAAWETARHTPVNSWLGNIIMYAPTCWARMILMTHFFSILLAQEQLEKTLDCQIYGACYSIEPLDLPQIIQRLHGLSAFSLHSYSPGEVNRVTSCLRKLGVPPLRVWRHRARSVRARLLSQGGRAATCGKYLFNWAVRTKLKLTPIPAASQLDLSSWFVAGYSGGDIYHSLSRARPRWFMWCLLLLSVGVGIYLLPNR

SEQ ID NO: 167 - protein, 591 aa, Artificial Sequence
  Synthetic peptide
SMSYTWTGALITPCAAEETKLPINALSNSLLRHHNLVYATTSRSASLRQKKVTFDRLQVLDDHYRDVLKEMKAKASTVKAKLLSVEEACKLTPPHSARSKFGYGAKDVRNLSSKAVNHIRSVWKDLLEDTETPIDTTIMAKNEVFCVQPEKGGRKPARLIVFPDLGVRVCEKMALYDVVSTLPQAVMGSSYGFQYSPGQRVEFLVNAWKAKKCPMGFAYDTRCFDSTVTENDIRVEESIYQCCDLAPEARQAIRSLTERLYIGGPLTNSKGQNCGYRRCRASGVLTTSCGNTLTCYLKAAAACRAAKLQDCTMLVCGDDLVVICESAGTQEDEASLRAFTEAMTRYSAPPGDPPKPEYDLELITSCSSNVSVAHDASGKRVYYLTRDPTTPLARAAWETARHTPVNSWLGNIIMYAPTCWARMILMTHFFSILLAQEQLEKTLDCQIYGACYSIEPLDLPQIIQRLHGLSAFSLHSYSPGEVNRVSSCLRKLGVPPLRVWRHRARSVRARLLSQGGRAATCGKYLFNWAVRTKLKLTPIPAASQLDLSSWFVAGYSGGDIYHSLSRARPRWFMWCLLLLSVGVGIYLLPNR

SEQ ID NO: 168 - protein, 591 aa, Artificial Sequence
  Synthetic peptide
SMSYTWTGALITPCAAEETKLPINALSNSLLRHHNLVYATTSRSASLRQKKVTFDRLQVLDDHYRDVLKEMKAKASTVKAKLLSVEEACKLTPPHSARSKFGYGAKDVRNLSSKAVNHIRSVWKDLLEDTETPIDTTIMAKNEVFCVQPEKGGRKPARLIVFPDLGVRVCEKMALYDVVSTLPQAVMGSSYGFQYSPGQRVEFLVNAWKAKKCPMGFAYDTRCFDSTVTENDIRVEESIYQCCDLAPEARQAIRSLTERLYIGGPLTNSKGQNCGYRRCRASGVLTTSCGNTLTCYLKAAAACRAAKLQDCTMLVCGDDLVVICESAGTQEDEASLRAFTEAMTRYSAPPGDPPKPEYDLELITSCSSNVSVAHDASGKRVYYLTRDPTTPLARAAWETARHTPVNSWLGNIIMYAPTCWARMILMTHFFSILLAQEQLEKTLDCQIYGACYSIEPLDLPQIIQRLHGLSAFSLHSYSPGEVNRVASCLRKLGIPPLRVWRHRARSVRARLLSQGGRAATCGKYLFNWAVRTKLKLTPIPAASQLDLSSWFVAGYSGGDIYHSLSRARPRWFMWCLLLLSVGVGIYLLPNR

SEQ ID NO: 169 - protein, 591 aa, Artificial Sequence
  Synthetic peptide
SMSYTWTGALITPCAAEETKLPINALSNSLLRHHNLVYATTSRSASLRQKKVTFDRLQVLDDHYRDVLKEMKAKASTVKAKLLSVEEACKLTPPHSARSKFGYGAKDVRNLSSKAVNHIRSVWKDLLEDTETPIDTTIMAKNEVFCVQPEKGGRKPARLIVFPDLGVRVCEKMALYDVVSTLPQAVMGSSYGFQYSPGQRVEFLVNAWKAKKCPMGFAYDTRCFDSTVTENDIRVEESIYQCCDLAPEARQAIRSLTERLYIGGPLTNSKGQNCGYRRCRASGVLTTSCGNTLTCYLKAAAACRAAKLQDCTMLVCGDDLVVICESAGTQEDEASLRAFTEAMTRYSAPPGDPPKPEYDLELITSCSSNVSVAHDASGKRVYYLTRDPTTPLARAAWETARHTPVNSWLGNIIMYAPTCWARMILMTHFFSILLAQEQLEKTLDCQIYGACYSIEPLDLPQIIQRLHGLSAFSLHSYSPGEVNRVVSCLRKLGIPPLRVWRHRARSVRARLLSQGGRAATCGKYLFNWAVRTKLKLTPIPAASQLDLSSWFVAGYSGGDIYHSLSRARPRWFMWCLLLLSVGVGIYLLPNR

SEQ ID NO: 170 - protein, 591 aa, Artificial Sequence
  Synthetic peptide
SMSYTWTGALITPCAAEETKLPINALSNSLLRHHNLVYATTSRSASLRQKKVTFDRLQVLDDHYRDVLKEMKAKASTVKAKLLSVEEACKLTPPHSARSKFGYGAKDVRNLSSKAVNHIRSVWKDLLEDTETPIDTTIMAKNEVFCVQPEKGGRKPARLIVFPDLGVRVCEKMALYDVVSTLPQAVMGSSYGFQYSPGQRVEFLVNAWKAKKCPMGFAYDTRCFDSTVTENDIRVEESIYQCCDLAPEARQAIRSLTERLYIGGPLTNSKGQNCGYRRCRASGVLTTSCGNTLTCYLKAAAACRAAKLQDCTMLVCGDDLVVICESAGTQEDEASLRAFTEAMTRYSAPPGDPPKPEYDLELITSCSSNVSVAHDASGKRVYYLTRDPTTPLARAAWETARHTPVNSWLGNIIMYAPTCWARMILMTHFFSILLAQEQLEKTLDCQIYGACYSIEPLDLPQIIQRLHGLSAFSLHSYSPGEVNRVISCLRKLGIPPLRVWRHRARSVRARLLSQGGRAATCGKYLFNWAVRTKLKLTPIPAASQLDLSSWFVAGYSGGDIYHSLSRARPRWFMWCLLLLSVGVGIYLLPNR

SEQ ID NO: 171 - protein, 591 aa, Artificial Sequence
  Synthetic peptide
SMSYTWTGALITPCAAEETKLPINALSNSLLRHHNLVYATTSRSASLRQKKVTFDRLQVLDDHYRDVLKEMKAKASTVKAKLLSVEEACKLTPPHSARSKFGYGAKDVRNLSSKAVNHIRSVWKDLLEDTETPIDTTIMAKNEVFCVQPEKGGRKPARLIVFPDLGVRVCEKMALYDVVSTLPQAVMGSSYGFQYSPGQRVEFLVNAWKAKKCPMGFAYDTRCFDSTVTENDIRVEESIYQCCDLAPEARQAIRSLTERLYIGGPLTNSKGQNCGYRRCRASGVLTTSCGNTLTCYLKAAAACRAAKLQDCTMLVCGDDLVVICESAGTQEDEASLRAFTEAMTRYSAPPGDPPKPEYDLELITSCSSNVSVAHDASGKRVYYLTRDPTTPLARAAWETARHTPVNSWLGNIIMYAPTCWARMILMTHFFSILLAQEQLEKTLDCQIYGACYSIEPLDLPQIIQRLHGLSAFSLHSYSPGEVNRVTSCLRKLGIPPLRVWRHRARSVRARLLSQGGRAATCGKYLFNWAVRTKLKLTPIPAASQLDLSSWFVAGYSGGDIYHSLSRARPRWFMWCLLLLSVGVGIYLLPNR

SEQ ID NO: 172 - protein, 591 aa, Artificial Sequence
  Synthetic peptide
SMSYTWTGALITPCAAEETKLPINALSNSLLRHHNLVYATTSRSASLRQKKVTFDRLQVLDDHYRDVLKEMKAKASTVKAKLLSVEEACKLTPPHSARSKFGYGAKDVRNLSSKAVNHIRSVWKDLLEDTETPIDTTIMAKNEVFCVQPEKGGRKPARLIVFPDLGVRVCEKMALYDVVSTLPQAVMGSSYGFQYSPGQRVEFLVNAWKAKKCPMGFAYDTRCFDSTVTENDIRVEESIYQCCDLAPEARQAIRSLTERLYIGGPLTNSKGQNCGYRRCRASGVLTTSCGNTLTCYLKAAAACRAAKLQDCTMLVCGDDLVVICESAGTQEDEASLRAFTEAMTRYSAPPGDPPKPEYDLELITSCSSNVSVAHDASGKRVYYLTRDPTTPLARAAWETARHTPVNSWLGNIIMYAPTCWARMILMTHFFSILLAQEQLEKTLDCQIYGACYSIEPLDLPQIIQRLHGLSAFSLHSYSPGEVNRVSSCLRKLGIPPLRVWRHRARSVRARLLSQGGRAATCGKYLFNWAVRTKLKLTPIPAASQLDLSSWFVAGYSGGDIYHSLSRARPRWFMWCLLLLSVGVGIYLLPNR

SEQ ID NO: 173 - protein, 591 aa, Artificial Sequence
  Synthetic peptide
SMSYTWTGALITPCAAEETKLPINALSNSLLRHHNLVYATTSRSASLRQKKVTFDRLQVLDDHYRDVLKEMKAKASTVKAKLLSVEEACKLTPPHSARSKFGYGAKDVRNLSSKAVNHIRSVWKDLLEDTETPIDTTIMAKNEVFCVQPEKGGRKPARLIVFPDLGVRVCEKMALYDVVSTLPQAVMGSSYGFQYSPGQRVEFLVNAWKAKKCPMGFAYDTRCFDSTVTENDIRVEESIYQCCDLAPEARQAIRSLTERLYIGGPLTNSKGQNCGYRRCRASGVLTTSCGNTLTCYLKAAAACRAAKLQDCTMLVCGDDLVVICESAGTQEDEASLRAFTEAMTRYSAPPGDPPKPEYDLELITSCSSNVSVAHDASGKRVYYLTRDPTTPLARAAWETARHTPVNSWLGNIIMYAPTCWARAILMTHFFSILLAQEQLEKTLDCQIYGACYSIEPLDLPQIIQRLHGLSAFSLHSYSPGEVNRVASCLRKLGVPPLRVWRHRARSVRARLLSQGGRAATCGKYLFNWAVRTKLKLTPIPAASQLDLSSWFVAGYSGGDIYHSLSRARPRWFMWCLLLLSVGVGIYLLPNR

SEQ ID NO: 174 - protein, 591 aa, Artificial Sequence
  Synthetic peptide
SMSYTWTGALITPCAAEETKLPINALSNSLLRHHNLVYATTSRSASLRQKKVTFDRLQVLDDHYRDVLKEMKAKASTVKAKLLSVEEACKLTPPHSARSKFGYGAKDVRNLSSKAVNHIRSVWKDLLEDTETPIDTTIMAKNEVFCVQPEKGGRKPARLIVFPDLGVRVCEKMALYDVVSTLPQAVMGSSYGFQYSPGQRVEFLVNAWKAKKCPMGFAYDTRCFDSTVTENDIRVEESIYQCCDLAPEARQAIRSLTERLYIGGPLTNSKGQNCGYRRCRASGVLTTSCGNTLTCYLKAAAACRAAKLQDCTMLVCGDDLVVICESAGTQEDEASLRAFTEAMTRYSAPPGDPPKPEYDLELITSCSSNVSVAHDASGKRVYYLTRDPTTPLARAAWETARHTPVNSWLGNIIMYAPTCWARAILMTHFFSILLAQEQLEKTLDCQIYGACYSIEPLDLPQIIQRLHGLSAFSLHSYSPGEVNRVVSCLRKLGVPPLRVWRHRARSVRARLLSQGGRAATCGKYLFNWAVRTKLKLTPIPAASQLDLSSWFVAGYSGGDIYHSLSRARPRWFMWCLLLLSVGVGIYLLPNR

SEQ ID NO: 175 - protein, 591 aa, Artificial Sequence
  Synthetic peptid
SMSYTWTGALITPCAAEETKLPINALSNSLLRHHNLVYATTSRSASLRQKKVTFDRLQVLDDHYRDVLKEMKAKASTVKAKLLSVEEACKLTPPHSARSKFGYGAKDVRNLSSKAVNHIRSVWKDLLEDTETPIDTTIMAKNEVFCVQPEKGGRKPARLIVFPDLGVRVCEKMALYDVVSTLPQAVMGSSYGFQYSPGQRVEFLVNAWKAKKCPMGFAYDTRCFDSTVTENDIRVEESIYQCCDLAPEARQAIRSLTERLYIGGPLTNSKGQNCGYRRCRASGVLTTSCGNTLTCYLKAAAACRAAKLQDCTMLVCGDDLVVICESAGTQEDEASLRAFTEAMTRYSAPPGDPPKPEYDLELITSCSSNVSVAHDASGKRVYYLTRDPTTPLARAAWETARHTPVNSWLGNIIMYAPTCWARAILMTHFFSILLAQEQLEKTLDCQIYGACYSIEPLDLPQIIQRLHGLSAFSLHSYSPGEVNRVISCLRKLGVPPLRVWRHRARSVRARLLSQGGRAATCGKYLFNWAVRTKLKLTPIPAASQLDLSSWFVAGYSGGDIYHSLSRARPRWFMWCLLLLSVGVGIYLLPNR

SEQ ID NO: 176 - protein, 591 aa, Artificial Sequence
  Synthetic peptide
SMSYTWTGALITPCAAEETKLPINALSNSLLRHHNLVYATTSRSASLRQKKVTFDRLQVLDDHYRDVLKEMKAKASTVKAKLLSVEEACKLTPPHSARSKFGYGAKDVRNLSSKAVNHIRSVWKDLLEDTETPIDTTIMAKNEVFCVQPEKGGRKPARLIVFPDLGVRVCEKMALYDVVSTLPQAVMGSSYGFQYSPGQRVEFLVNAWKAKKCPMGFAYDTRCFDSTVTENDIRVEESIYQCCDLAPEARQAIRSLTERLYIGGPLTNSKGQNCGYRRCRASGVLTTSCGNTLTCYLKAAAACRAAKLQDCTMLVCGDDLVVICESAGTQEDEASLRAFTEAMTRYSAPPGDPPKPEYDLELITSCSSNVSVAHDASGKRVYYLTRDPTTPLARAAWETARHTPVNSWLGNIIMYAPTCWARAILMTHFFSILLAQEQLEKTLDCQIYGACYSIEPLDLPQIIQRLHGLSAFSLHSYSPGEVNRVTSCLRKLGVPPLRVWRHRARSVRARLLSQGGRAATCGKYLFNWAVRTKLKLTPIPAASQLDLSSWFVAGYSGGDIYHSLSRARPRWFMWCLLLLSVGVGIYLLPNR

SEQ ID NO: 177 - protein, 591 aa, Artificial Sequence
  Synthetic peptide
SMSYTWTGALITPCAAEETKLPINALSNSLLRHHNLVYATTSRSASLRQKKVTFDRLQVLDDHYRDVLKEMKAKASTVKAKLLSVEEACKLTPPHSARSKFGYGAKDVRNLSSKAVNHIRSVWKDLLEDTETPIDTTIMAKNEVFCVQPEKGGRKPARLIVFPDLGVRVCEKMALYDVVSTLPQAVMGSSYGFQYSPGQRVEFLVNAWKAKKCPMGFAYDTRCFDSTVTENDIRVEESIYQCCDLAPEARQAIRSLTERLYIGGPLTNSKGQNCGYRRCRASGVLTTSCGNTLTCYLKAAAACRAAKLQDCTMLVCGDDLVVICESAGTQEDEASLRAFTEAMTRYSAPPGDPPKPEYDLELITSCSSNVSVAHDASGKRVYYLTRDPTTPLARAAWETARHTPVNSWLGNIIMYAPTCWARAILMTHFFSILLAQEQLEKTLDCQIYGACYSIEPLDLPQIIQRLHGLSAFSLHSYSPGEVNRVSSCLRKLGVPPLRVWRHRARSVRARLLSQGGRAATCGKYLFNWAVRTKLKLTPIPAASQLDLSSWFVAGYSGGDIYHSLSRARPRWFMWCLLLLSVGVGIYLLPNR

SEQ ID NO: 178 - protein, 591 aa, Artificial Sequence
  Synthetic peptide
SMSYTWTGALITPCAAEETKLPINALSNSLLRHHNLVYATTSRSASLRQKKVTFDRLQVLDDHYRDVLKEMKAKASTVKAKLLSVEEACKLTPPHSARSKFGYGAKDVRNLSSKAVNHIRSVWKDLLEDTETPIDTTIMAKNEVFCVQPEKGGRKPARLIVFPDLGVRVCEKMALYDVVSTLPQAVMGSSYGFQYSPGQRVEFLVNAWKAKKCPMGFAYDTRCFDSTVTENDIRVEESIYQCCDLAPEARQAIRSLTERLYIGGPLTNSKGQNCGYRRCRASGVLTTSCGNTLTCYLKAAAACRAAKLQDCTMLVCGDDLVVICESAGTQEDEASLRAFTEAMTRYSAPPGDPPKPEYDLELITSCSSNVSVAHDASGKRVYYLTRDPTTPLARAAWETARHTPVNSWLGNIIMYAPTCWARAILMTHFFSILLAQEQLEKTLDCQIYGACYSIEPLDLPQIIQRLHGLSAFSLHSYSPGEVNRVASCLRKLGIPPLRVWRHRARSVRARLLSQGGRAATCGKYLFNWAVRTKLKLTPIPAASQLDLSSWFVAGYSGGDIYHSLSRARPRWFMWCLLLLSVGVGIYLLPNR

SEQ ID NO: 179 - protein, 591 aa, Artificial Sequence
  Synthetic peptide
SMSYTWTGALITPCAAEETKLPINALSNSLLRHHNLVYATTSRSASLRQKKVTFDRLQVLDDHYRDVLKEMKAKASTVKAKLLSVEEACKLTPPHSARSKFGYGAKDVRNLSSKAVNHIRSVWKDLLEDTETPIDTTIMAKNEVFCVQPEKGGRKPARLIVFPDLGVRVCEKMALYDVVSTLPQAVMGSSYGFQYSPGQRVEFLVNAWKAKKCPMGFAYDTRCFDSTVTENDIRVEESIYQCCDLAPEARQAIRSLTERLYIGGPLTNSKGQNCGYRRCRASGVLTTSCGNTLTCYLKAAAACRAAKLQDCTMLVCGDDLVVICESAGTQEDEASLRAFTEAMTRYSAPPGDPPKPEYDLELITSCSSNVSVAHDASGKRVYYLTRDPTTPLARAAWETARHTPVNSWLGNIIMYAPTCWARAILMTHFFSILLAQEQLEKTLDCQIYGACYSIEPLDLPQIIQRLHGLSAFSLHSYSPGEVNRVVSCLRKLGIPPLRVWRHRARSVRARLLSQGGRAATCGKYLFNWAVRTKLKLTPIPAASQLDLSSWFVAGYSGGDIYHSLSRARPRWFMWCLLLLSVGVGIYLLPNR

SEQ ID NO: 180 - protein, 591 aa, Artificial Sequence
  Synthetic peptide
SMSYTWTGALITPCAAEETKLPINALSNSLLRHHNLVYATTSRSASLRQKKVTFDRLQVLDDHYRDVLKEMKAKASTVKAKLLSVEEACKLTPPHSARSKFGYGAKDVRNLSSKAVNHIRSVWKDLLEDTETPIDTTIMAKNEVFCVQPEKGGRKPARLIVFPDLGVRVCEKMALYDVVSTLPQAVMGSSYGFQYSPGQRVEFLVNAWKAKKCPMGFAYDTRCFDSTVTENDIRVEESIYQCCDLAPEARQAIRSLTERLYIGGPLTNSKGQNCGYRRCRASGVLTTSCGNTLTCYLKAAAACRAAKLQDCTMLVCGDDLVVICESAGTQEDEASLRAFTEAMTRYSAPPGDPPKPEYDLELITSCSSNVSVAHDASGKRVYYLTRDPTTPLARAAWETARHTPVNSWLGNIIMYAPTCWARAILMTHFFSILLAQEQLEKTLDCQIYGACYSIEPLDLPQIIQRLHGLSAFSLHSYSPGEVNRVISCLRKLGIPPLRVWRHRARSVRARLLSQGGRAATCGKYLFNWAVRTKLKLTPIPAASQLDLSSWFVAGYSGGDIYHSLSRARPRWFMWCLLLLSVGVGIYLLPNR

SEQ ID NO: 181 - protein, 591 aa, Artificial Sequence
  Synthetic peptide
SMSYTWTGALITPCAAEETKLPINALSNSLLRHHNLVYATTSRSASLRQKKVTFDRLQVLDDHYRDVLKEMKAKASTVKAKLLSVEEACKLTPPHSARSKFGYGAKDVRNLSSKAVNHIRSVWKDLLEDTETPIDTTIMAKNEVFCVQPEKGGRKPARLIVFPDLGVRVCEKMALYDVVSTLPQAVMGSSYGFQYSPGQRVEFLVNAWKAKKCPMGFAYDTRCFDSTVTENDIRVEESIYQCCDLAPEARQAIRSLTERLYIGGPLTNSKGQNCGYRRCRASGVLTTSCGNTLTCYLKAAAACRAAKLQDCTMLVCGDDLVVICESAGTQEDEASLRAFTEAMTRYSAPPGDPPKPEYDLELITSCSSNVSVAHDASGKRVYYLTRDPTTPLARAAWETARHTPVNSWLGNIIMYAPTCWARAILMTHFFSILLAQEQLEKTLDCQIYGACYSIEPLDLPQIIQRLHGLSAFSLHSYSPGEVNRVTSCLRKLGIPPLRVWRHRARSVRARLLSQGGRAATCGKYLFNWAVRTKLKLTPIPAASQLDLSSWFVAGYSGGDIYHSLSRARPRWFMWCLLLLSVGVGIYLLPNR

SEQ ID NO: 182 - protein, 591 aa, Artificial Sequence
  Synthetic peptide
SMSYTWTGALITPCAAEETKLPINALSNSLLRHHNLVYATTSRSASLRQKKVTFDRLQVLDDHYRDVLKEMKAKASTVKAKLLSVEEACKLTPPHSARSKFGYGAKDVRNLSSKAVNHIRSVWKDLLEDTETPIDTTIMAKNEVFCVQPEKGGRKPARLIVFPDLGVRVCEKMALYDVVSTLPQAVMGSSYGFQYSPGQRVEFLVNAWKAKKCPMGFAYDTRCFDSTVTENDIRVEESIYQCCDLAPEARQAIRSLTERLYIGGPLTNSKGQNCGYRRCRASGVLTTSCGNTLTCYLKAAAACRAAKLQDCTMLVCGDDLVVICESAGTQEDEASLRAFTEAMTRYSAPPGDPPKPEYDLELITSCSSNVSVAHDASGKRVYYLTRDPTTPLARAAWETARHTPVNSWLGNIIMYAPTCWARAILMTHFFSILLAQEQLEKTLDCQIYGACYSIEPLDLPQIIQRLHGLSAFSLHSYSPGEVNRVSSCLRKLGIPPLRVWRHRARSVRARLLSQGGRAATCGKYLFNWAVRTKLKLTPIPAASQLDLSSWFVAGYSGGDIYHSLSRARPRWFMWCLLLLSVGVGIYLLPNR

SEQ ID NO: 183 - protein, 591 aa, Artificial Sequence
  Synthetic peptide
SMSYTWTGALITPCAAEETKLPINALSNSLLRHHNLVYATTSRSASLRQKKVTFDRLQVLDDHYRDVLKEMKAKASTVKAKLLSVEEACKLTPPHSARSKFGYGAKDVRNLSSKAVNHIRSVWKDLLEDTETPIDTTIMAKNEVFCVQPEKGGRKPARLIVFPDLGVRVCEKMALYDVVSTLPQAVMGSSYGFQYSPGQRVEFLVNAWKAKKCPMGFAYDTRCFDSTVTENDIRVEESIYQCCDLAPEARQAIRSLTERLYIGGPLTNSKGQNCGYRRCRASGVLTTSCGNTLTCYLKAAAACRAAKLQDCTMLVCGDDLVVICESAGTQEDEASLRAFTEAMTRYSAPPGDPPKPEYDLELITSCSSNVSVAHDASGKRVYYLTRDPTTPLARAAWETARHTPVNSWLGNIIMYAPTCWARMILMTHFFSILLAQEQLEKTLDCQIYGACYSIEPLDLPQIIQRLHGLSAFSLHSYSPGEDNRVASCLRKLGVPPLRVWRHRARSVRARLLSQGGRAATCGKYLFNWAVRTKLKLTPIPAASQLDLSSWFVAGYSGGDIYHSLSRARPRWFMWCLLLLSVGVGIYLLPNR

SEQ ID NO: 184 - protein, 591 aa, Artificial Sequence
  Synthetic peptide
SMSYTWTGALITPCAAEETKLPINALSNSLLRHHNLVYATTSRSASLRQKKVTFDRLQVLDDHYRDVLKEMKAKASTVKAKLLSVEEACKLTPPHSARSKFGYGAKDVRNLSSKAVNHIRSVWKDLLEDTETPIDTTIMAKNEVFCVQPEKGGRKPARLIVFPDLGVRVCEKMALYDVVSTLPQAVMGSSYGFQYSPGQRVEFLVNAWKAKKCPMGFAYDTRCFDSTVTENDIRVEESIYQCCDLAPEARQAIRSLTERLYIGGPLTNSKGQNCGYRRCRASGVLTTSCGNTLTCYLKAAAACRAAKLQDCTMLVCGDDLVVICESAGTQEDEASLRAFTEAMTRYSAPPGDPPKPEYDLELITSCSSNVSVAHDASGKRVYYLTRDPTTPLARAAWETARHTPVNSWLGNIIMYAPTCWARMILMTHFFSILLAQEQLEKTLDCQIYGACYSIEPLDLPQIIQRLHGLSAFSLHSYSPGEDNRVVSCLRKLGVPPLRVWRHRARSVRARLLSQGGRAATCGKYLFNWAVRTKLKLTPIPAASQLDLSSWFVAGYSGGDIYHSLSRARPRWFMWCLLLLSVGVGIYLLPNR

SEQ ID NO: 185 - protein, 591 aa, Artificial Sequence
  Synthetic peptid
SMSYTWTGALITPCAAEETKLPINALSNSLLRHHNLVYATTSRSASLRQKKVTFDRLQVLDDHYRDVLKEMKAKASTVKAKLLSVEEACKLTPPHSARSKFGYGAKDVRNLSSKAVNHIRSVWKDLLEDTETPIDTTIMAKNEVFCVQPEKGGRKPARLIVFPDLGVRVCEKMALYDVVSTLPQAVMGSSYGFQYSPGQRVEFLVNAWKAKKCPMGFAYDTRCFDSTVTENDIRVEESIYQCCDLAPEARQAIRSLTERLYIGGPLTNSKGQNCGYRRCRASGVLTTSCGNTLTCYLKAAAACRAAKLQDCTMLVCGDDLVVICESAGTQEDEASLRAFTEAMTRYSAPPGDPPKPEYDLELITSCSSNVSVAHDASGKRVYYLTRDPTTPLARAAWETARHTPVNSWLGNIIMYAPTCWARMILMTHFFSILLAQEQLEKTLDCQIYGACYSIEPLDLPQIIQRLHGLSAFSLHSYSPGEDNRVISCLRKLGVPPLRVWRHRARSVRARLLSQGGRAATCGKYLFNWAVRTKLKLTPIPAASQLDLSSWFVAGYSGGDIYHSLSRARPRWFMWCLLLLSVGVGIYLLPNR

SEQ ID NO: 186 - protein, 591 aa, Artificial Sequence
  Synthetic peptide
SMSYTWTGALITPCAAEETKLPINALSNSLLRHHNLVYATTSRSASLRQKKVTFDRLQVLDDHYRDVLKEMKAKASTVKAKLLSVEEACKLTPPHSARSKFGYGAKDVRNLSSKAVNHIRSVWKDLLEDTETPIDTTIMAKNEVFCVQPEKGGRKPARLIVFPDLGVRVCEKMALYDVVSTLPQAVMGSSYGFQYSPGQRVEFLVNAWKAKKCPMGFAYDTRCFDSTVTENDIRVEESIYQCCDLAPEARQAIRSLTERLYIGGPLTNSKGQNCGYRRCRASGVLTTSCGNTLTCYLKAAAACRAAKLQDCTMLVCGDDLVVICESAGTQEDEASLRAFTEAMTRYSAPPGDPPKPEYDLELITSCSSNVSVAHDASGKRVYYLTRDPTTPLARAAWETARHTPVNSWLGNIIMYAPTCWARMILMTHFFSILLAQEQLEKTLDCQIYGACYSIEPLDLPQIIQRLHGLSAFSLHSYSPGEDNRVTSCLRKLGVPPLRVWRHRARSVRARLLSQGGRAATCGKYLFNWAVRTKLKLTPIPAASQLDLSSWFVAGYSGGDIYHSLSRARPRWFMWCLLLLSVGVGIYLLPNR

SEQ ID NO: 187 - protein, 591 aa, Artificial Sequence
  Synthetic peptide
SMSYTWTGALITPCAAEETKLPINALSNSLLRHHNLVYATTSRSASLRQKKVTFDRLQVLDDHYRDVLKEMKAKASTVKAKLLSVEEACKLTPPHSARSKFGYGAKDVRNLSSKAVNHIRSVWKDLLEDTETPIDTTIMAKNEVFCVQPEKGGRKPARLIVFPDLGVRVCEKMALYDVVSTLPQAVMGSSYGFQYSPGQRVEFLVNAWKAKKCPMGFAYDTRCFDSTVTENDIRVEESIYQCCDLAPEARQAIRSLTERLYIGGPLTNSKGQNCGYRRCRASGVLTTSCGNTLTCYLKAAAACRAAKLQDCTMLVCGDDLVVICESAGTQEDEASLRAFTEAMTRYSAPPGDPPKPEYDLELITSCSSNVSVAHDASGKRVYYLTRDPTTPLARAAWETARHTPVNSWLGNIIMYAPTCWARMILMTHFFSILLAQEQLEKTLDCQIYGACYSIEPLDLPQIIQRLHGLSAFSLHSYSPGEDNRVSSCLRKLGVPPLRVWRHRARSVRARLLSQGGRAATCGKYLFNWAVRTKLKLTPIPAASQLDLSSWFVAGYSGGDIYHSLSRARPRWFMWCLLLLSVGVGIYLLPNR

SEQ ID NO: 188 - protein, 591 aa, Artificial Sequence
  Synthetic peptide
SMSYTWTGALITPCAAEETKLPINALSNSLLRHHNLVYATTSRSASLRQKKVTFDRLQVLDDHYRDVLKEMKAKASTVKAKLLSVEEACKLTPPHSARSKFGYGAKDVRNLSSKAVNHIRSVWKDLLEDTETPIDTTIMAKNEVFCVQPEKGGRKPARLIVFPDLGVRVCEKMALYDVVSTLPQAVMGSSYGFQYSPGQRVEFLVNAWKAKKCPMGFAYDTRCFDSTVTENDIRVEESIYQCCDLAPEARQAIRSLTERLYIGGPLTNSKGQNCGYRRCRASGVLTTSCGNTLTCYLKAAAACRAAKLQDCTMLVCGDDLVVICESAGTQEDEASLRAFTEAMTRYSAPPGDPPKPEYDLELITSCSSNVSVAHDASGKRVYYLTRDPTTPLARAAWETARHTPVNSWLGNIIMYAPTCWARMILMTHFFSILLAQEQLEKTLDCQIYGACYSIEPLDLPQIIQRLHGLSAFSLHSYSPGEDNRVASCLRKLGIPPLRVWRHRARSVRARLLSQGGRAATCGKYLFNWAVRTKLKLTPIPAASQLDLSSWFVAGYSGGDIYHSLSRARPRWFMWCLLLLSVGVGIYLLPNR

SEQ ID NO: 189 - protein, 591 aa, Artificial Sequence
  Synthetic peptide
SMSYTWTGALITPCAAEETKLPINALSNSLLRHHNLVYATTSRSASLRQKKVTFDRLQVLDDHYRDVLKEMKAKASTVKAKLLSVEEACKLTPPHSARSKFGYGAKDVRNLSSKAVNHIRSVWKDLLEDTETPIDTTIMAKNEVFCVQPEKGGRKPARLIVFPDLGVRVCEKMALYDVVSTLPQAVMGSSYGFQYSPGQRVEFLVNAWKAKKCPMGFAYDTRCFDSTVTENDIRVEESIYQCCDLAPEARQAIRSLTERLYIGGPLTNSKGQNCGYRRCRASGVLTTSCGNTLTCYLKAAAACRAAKLQDCTMLVCGDDLVVICESAGTQEDEASLRAFTEAMTRYSAPPGDPPKPEYDLELITSCSSNVSVAHDASGKRVYYLTRDPTTPLARAAWETARHTPVNSWLGNIIMYAPTCWARMILMTHFFSILLAQEQLEKTLDCQIYGACYSIEPLDLPQIIQRLHGLSAFSLHSYSPGEDNRVVSCLRKLGIPPLRVWRHRARSVRARLLSQGGRAATCGKYLFNWAVRTKLKLTPIPAASQLDLSSWFVAGYSGGDIYHSLSRARPRWFMWCLLLLSVGVGIYLLPNR

SEQ ID NO: 190 - protein, 591 aa, Artificial Sequence
  Synthetic peptide
SMSYTWTGALITPCAAEETKLPINALSNSLLRHHNLVYATTSRSASLRQKKVTFDRLQVLDDHYRDVLKEMKAKASTVKAKLLSVEEACKLTPPHSARSKFGYGAKDVRNLSSKAVNHIRSVWKDLLEDTETPIDTTIMAKNEVFCVQPEKGGRKPARLIVFPDLGVRVCEKMALYDVVSTLPQAVMGSSYGFQYSPGQRVEFLVNAWKAKKCPMGFAYDTRCFDSTVTENDIRVEESIYQCCDLAPEARQAIRSLTERLYIGGPLTNSKGQNCGYRRCRASGVLTTSCGNTLTCYLKAAAACRAAKLQDCTMLVCGDDLVVICESAGTQEDEASLRAFTEAMTRYSAPPGDPPKPEYDLELITSCSSNVSVAHDASGKRVYYLTRDPTTPLARAAWETARHTPVNSWLGNIIMYAPTCWARMILMTHFFSILLAQEQLEKTLDCQIYGACYSIEPLDLPQIIQRLHGLSAFSLHSYSPGEDNRVISCLRKLGIPPLRVWRHRARSVRARLLSQGGRAATCGKYLFNWAVRTKLKLTPIPAASQLDLSSWFVAGYSGGDIYHSLSRARPRWFMWCLLLLSVGVGIYLLPNR

SEQ ID NO: 191 - protein, 591 aa, Artificial Sequence
  Synthetic peptide
SMSYTWTGALITPCAAEETKLPINALSNSLLRHHNLVYATTSRSASLRQKKVTFDRLQVLDDHYRDVLKEMKAKASTVKAKLLSVEEACKLTPPHSARSKFGYGAKDVRNLSSKAVNHIRSVWKDLLEDTETPIDTTIMAKNEVFCVQPEKGGRKPARLIVFPDLGVRVCEKMALYDVVSTLPQAVMGSSYGFQYSPGQRVEFLVNAWKAKKCPMGFAYDTRCFDSTVTENDIRVEESIYQCCDLAPEARQAIRSLTERLYIGGPLTNSKGQNCGYRRCRASGVLTTSCGNTLTCYLKAAAACRAAKLQDCTMLVCGDDLVVICESAGTQEDEASLRAFTEAMTRYSAPPGDPPKPEYDLELITSCSSNVSVAHDASGKRVYYLTRDPTTPLARAAWETARHTPVNSWLGNIIMYAPTCWARMILMTHFFSILLAQEQLEKTLDCQIYGACYSIEPLDLPQIIQRLHGLSAFSLHSYSPGEDNRVTSCLRKLGIPPLRVWRHRARSVRARLLSQGGRAATCGKYLFNWAVRTKLKLTPIPAASQLDLSSWFVAGYSGGDIYHSLSRARPRWFMWCLLLLSVGVGIYLLPNR

SEQ ID NO: 192 - protein, 591 aa, Artificial Sequence
  Synthetic peptide
SMSYTWTGALITPCAAEETKLPINALSNSLLRHHNLVYATTSRSASLRQKKVTFDRLQVLDDHYRDVLKEMKAKASTVKAKLLSVEEACKLTPPHSARSKFGYGAKDVRNLSSKAVNHIRSVWKDLLEDTETPIDTTIMAKNEVFCVQPEKGGRKPARLIVFPDLGVRVCEKMALYDVVSTLPQAVMGSSYGFQYSPGQRVEFLVNAWKAKKCPMGFAYDTRCFDSTVTENDIRVEESIYQCCDLAPEARQAIRSLTERLYIGGPLTNSKGQNCGYRRCRASGVLTTSCGNTLTCYLKAAAACRAAKLQDCTMLVCGDDLVVICESAGTQEDEASLRAFTEAMTRYSAPPGDPPKPEYDLELITSCSSNVSVAHDASGKRVYYLTRDPTTPLARAAWETARHTPVNSWLGNIIMYAPTCWARMILMTHFFSILLAQEQLEKTLDCQIYGACYSIEPLDLPQIIQRLHGLSAFSLHSYSPGEDNRVSSCLRKLGIPPLRVWRHRARSVRARLLSQGGRAATCGKYLFNWAVRTKLKLTPIPAASQLDLSSWFVAGYSGGDIYHSLSRARPRWFMWCLLLLSVGVGIYLLPNR

SEQ ID NO: 193 - protein, 591 aa, Artificial Sequence
  Synthetic peptide
SMSYTWTGALITPCAAEETKLPINALSNSLLRHHNLVYATTSRSASLRQKKVTFDRLQVLDDHYRDVLKEMKAKASTVKAKLLSVEEACKLTPPHSARSKFGYGAKDVRNLSSKAVNHIRSVWKDLLEDTETPIDTTIMAKNEVFCVQPEKGGRKPARLIVFPDLGVRVCEKMALYDVVSTLPQAVMGSSYGFQYSPGQRVEFLVNAWKAKKCPMGFAYDTRCFDSTVTENDIRVEESIYQCCDLAPEARQAIRSLTERLYIGGPLTNSKGQNCGYRRCRASGVLTTSCGNTLTCYLKAAAACRAAKLQDCTMLVCGDDLVVICESAGTQEDEASLRAFTEAMTRYSAPPGDPPKPEYDLELITSCSSNVSVAHDASGKRVYYLTRDPTTPLARAAWETARHTPVNSWLGNIIMYAPTCWARAILMTHFFSILLAQEQLEKTLDCQIYGACYSIEPLDLPQIIQRLHGLSAFSLHSYSPGEDNRVASCLRKLGVPPLRVWRHRARSVRARLLSQGGRAATCGKYLFNWAVRTKLKLTPIPAASQLDLSSWFVAGYSGGDIYHSLSRARPRWFMWCLLLLSVGVGIYLLPNR

SEQ ID NO: 194 - protein, 591 aa, Artificial Sequence
  Synthetic peptide
SMSYTWTGALITPCAAEETKLPINALSNSLLRHHNLVYATTSRSASLRQKKVTFDRLQVLDDHYRDVLKEMKAKASTVKAKLLSVEEACKLTPPHSARSKFGYGAKDVRNLSSKAVNHIRSVWKDLLEDTETPIDTTIMAKNEVFCVQPEKGGRKPARLIVFPDLGVRVCEKMALYDVVSTLPQAVMGSSYGFQYSPGQRVEFLVNAWKAKKCPMGFAYDTRCFDSTVTENDIRVEESIYQCCDLAPEARQAIRSLTERLYIGGPLTNSKGQNCGYRRCRASGVLTTSCGNTLTCYLKAAAACRAAKLQDCTMLVCGDDLVVICESAGTQEDEASLRAFTEAMTRYSAPPGDPPKPEYDLELITSCSSNVSVAHDASGKRVYYLTRDPTTPLARAAWETARHTPVNSWLGNIIMYAPTCWARAILMTHFFSILLAQEQLEKTLDCQIYGACYSIEPLDLPQIIQRLHGLSAFSLHSYSPGEDNRVVSCLRKLGVPPLRVWRHRARSVRARLLSQGGRAATCGKYLFNWAVRTKLKLTPIPAASQLDLSSWFVAGYSGGDIYHSLSRARPRWFMWCLLLLSVGVGIYLLPNR

SEQ ID NO: 195 - protein, 591 aa, Artificial Sequence
  Synthetic peptid
SMSYTWTGALITPCAAEETKLPINALSNSLLRHHNLVYATTSRSASLRQKKVTFDRLQVLDDHYRDVLKEMKAKASTVKAKLLSVEEACKLTPPHSARSKFGYGAKDVRNLSSKAVNHIRSVWKDLLEDTETPIDTTIMAKNEVFCVQPEKGGRKPARLIVFPDLGVRVCEKMALYDVVSTLPQAVMGSSYGFQYSPGQRVEFLVNAWKAKKCPMGFAYDTRCFDSTVTENDIRVEESIYQCCDLAPEARQAIRSLTERLYIGGPLTNSKGQNCGYRRCRASGVLTTSCGNTLTCYLKAAAACRAAKLQDCTMLVCGDDLVVICESAGTQEDEASLRAFTEAMTRYSAPPGDPPKPEYDLELITSCSSNVSVAHDASGKRVYYLTRDPTTPLARAAWETARHTPVNSWLGNIIMYAPTCWARAILMTHFFSILLAQEQLEKTLDCQIYGACYSIEPLDLPQIIQRLHGLSAFSLHSYSPGEDNRVISCLRKLGVPPLRVWRHRARSVRARLLSQGGRAATCGKYLFNWAVRTKLKLTPIPAASQLDLSSWFVAGYSGGDIYHSLSRARPRWFMWCLLLLSVGVGIYLLPNR

SEQ ID NO: 196 - protein, 591 aa, Artificial Sequence
  Synthetic peptide
SMSYTWTGALITPCAAEETKLPINALSNSLLRHHNLVYATTSRSASLRQKKVTFDRLQVLDDHYRDVLKEMKAKASTVKAKLLSVEEACKLTPPHSARSKFGYGAKDVRNLSSKAVNHIRSVWKDLLEDTETPIDTTIMAKNEVFCVQPEKGGRKPARLIVFPDLGVRVCEKMALYDVVSTLPQAVMGSSYGFQYSPGQRVEFLVNAWKAKKCPMGFAYDTRCFDSTVTENDIRVEESIYQCCDLAPEARQAIRSLTERLYIGGPLTNSKGQNCGYRRCRASGVLTTSCGNTLTCYLKAAAACRAAKLQDCTMLVCGDDLVVICESAGTQEDEASLRAFTEAMTRYSAPPGDPPKPEYDLELITSCSSNVSVAHDASGKRVYYLTRDPTTPLARAAWETARHTPVNSWLGNIIMYAPTCWARAILMTHFFSILLAQEQLEKTLDCQIYGACYSIEPLDLPQIIQRLHGLSAFSLHSYSPGEDNRVTSCLRKLGVPPLRVWRHRARSVRARLLSQGGRAATCGKYLFNWAVRTKLKLTPIPAASQLDLSSWFVAGYSGGDIYHSLSRARPRWFMWCLLLLSVGVGIYLLPNR

SEQ ID NO: 197 - protein, 591 aa, Artificial Sequence
  Synthetic peptide
SMSYTWTGALITPCAAEETKLPINALSNSLLRHHNLVYATTSRSASLRQKKVTFDRLQVLDDHYRDVLKEMKAKASTVKAKLLSVEEACKLTPPHSARSKFGYGAKDVRNLSSKAVNHIRSVWKDLLEDTETPIDTTIMAKNEVFCVQPEKGGRKPARLIVFPDLGVRVCEKMALYDVVSTLPQAVMGSSYGFQYSPGQRVEFLVNAWKAKKCPMGFAYDTRCFDSTVTENDIRVEESIYQCCDLAPEARQAIRSLTERLYIGGPLTNSKGQNCGYRRCRASGVLTTSCGNTLTCYLKAAAACRAAKLQDCTMLVCGDDLVVICESAGTQEDEASLRAFTEAMTRYSAPPGDPPKPEYDLELITSCSSNVSVAHDASGKRVYYLTRDPTTPLARAAWETARHTPVNSWLGNIIMYAPTCWARAILMTHFFSILLAQEQLEKTLDCQIYGACYSIEPLDLPQIIQRLHGLSAFSLHSYSPGEDNRVSSCLRKLGVPPLRVWRHRARSVRARLLSQGGRAATCGKYLFNWAVRTKLKLTPIPAASQLDLSSWFVAGYSGGDIYHSLSRARPRWFMWCLLLLSVGVGIYLLPNR

SEQ ID NO: 198 - protein, 591 aa, Artificial Sequence
  Synthetic peptide
SMSYTWTGALITPCAAEETKLPINALSNSLLRHHNLVYATTSRSASLRQKKVTFDRLQVLDDHYRDVLKEMKAKASTVKAKLLSVEEACKLTPPHSARSKFGYGAKDVRNLSSKAVNHIRSVWKDLLEDTETPIDTTIMAKNEVFCVQPEKGGRKPARLIVFPDLGVRVCEKMALYDVVSTLPQAVMGSSYGFQYSPGQRVEFLVNAWKAKKCPMGFAYDTRCFDSTVTENDIRVEESIYQCCDLAPEARQAIRSLTERLYIGGPLTNSKGQNCGYRRCRASGVLTTSCGNTLTCYLKAAAACRAAKLQDCTMLVCGDDLVVICESAGTQEDEASLRAFTEAMTRYSAPPGDPPKPEYDLELITSCSSNVSVAHDASGKRVYYLTRDPTTPLARAAWETARHTPVNSWLGNIIMYAPTCWARAILMTHFFSILLAQEQLEKTLDCQIYGACYSIEPLDLPQIIQRLHGLSAFSLHSYSPGEDNRVASCLRKLGIPPLRVWRHRARSVRARLLSQGGRAATCGKYLFNWAVRTKLKLTPIPAASQLDLSSWFVAGYSGGDIYHSLSRARPRWFMWCLLLLSVGVGIYLLPNR

SEQ ID NO: 199 - protein, 591 aa, Artificial Sequence
  Synthetic peptide
SMSYTWTGALITPCAAEETKLPINALSNSLLRHHNLVYATTSRSASLRQKKVTFDRLQVLDDHYRDVLKEMKAKASTVKAKLLSVEEACKLTPPHSARSKFGYGAKDVRNLSSKAVNHIRSVWKDLLEDTETPIDTTIMAKNEVFCVQPEKGGRKPARLIVFPDLGVRVCEKMALYDVVSTLPQAVMGSSYGFQYSPGQRVEFLVNAWKAKKCPMGFAYDTRCFDSTVTENDIRVEESIYQCCDLAPEARQAIRSLTERLYIGGPLTNSKGQNCGYRRCRASGVLTTSCGNTLTCYLKAAAACRAAKLQDCTMLVCGDDLVVICESAGTQEDEASLRAFTEAMTRYSAPPGDPPKPEYDLELITSCSSNVSVAHDASGKRVYYLTRDPTTPLARAAWETARHTPVNSWLGNIIMYAPTCWARAILMTHFFSILLAQEQLEKTLDCQIYGACYSIEPLDLPQIIQRLHGLSAFSLHSYSPGEDNRVVSCLRKLGIPPLRVWRHRARSVRARLLSQGGRAATCGKYLFNWAVRTKLKLTPIPAASQLDLSSWFVAGYSGGDIYHSLSRARPRWFMWCLLLLSVGVGIYLLPNR

SEQ ID NO: 200 - protein, 591 aa, Artificial Sequence
  Sythetic peptide
SMSYTWTGALITPCAAEETKLPINALSNSLLRHHNLVYATTSRSASLRQKKVTFDRLQVLDDHYRDVLKEMKAKASTVKAKLLSVEEACKLTPPHSARSKFGYGAKDVRNLSSKAVNHIRSVWKDLLEDTETPIDTTIMAKNEVFCVQPEKGGRKPARLIVFPDLGVRVCEKMALYDVVSTLPQAVMGSSYGFQYSPGQRVEFLVNAWKAKKCPMGFAYDTRCFDSTVTENDIRVEESIYQCCDLAPEARQAIRSLTERLYIGGPLTNSKGQNCGYRRCRASGVLTTSCGNTLTCYLKAAAACRAAKLQDCTMLVCGDDLVVICESAGTQEDEASLRAFTEAMTRYSAPPGDPPKPEYDLELITSCSSNVSVAHDASGKRVYYLTRDPTTPLARAAWETARHTPVNSWLGNIIMYAPTCWARAILMTHFFSILLAQEQLEKTLDCQIYGACYSIEPLDLPQIIQRLHGLSAFSLHSYSPGEDNRVISCLRKLGIPPLRVWRHRARSVRARLLSQGGRAATCGKYLFNWAVRTKLKLTPIPAASQLDLSSWFVAGYSGGDIYHSLSRARPRWFMWCLLLLSVGVGIYLLPNR

SEQ ID NO: 201 - protein, 591 aa, Artificial Sequence
  Synthetic peptide
SMSYTWTGALITPCAAEETKLPINALSNSLLRHHNLVYATTSRSASLRQKKVTFDRLQVLDDHYRDVLKEMKAKASTVKAKLLSVEEACKLTPPHSARSKFGYGAKDVRNLSSKAVNHIRSVWKDLLEDTETPIDTTIMAKNEVFCVQPEKGGRKPARLIVFPDLGVRVCEKMALYDVVSTLPQAVMGSSYGFQYSPGQRVEFLVNAWKAKKCPMGFAYDTRCFDSTVTENDIRVEESIYQCCDLAPEARQAIRSLTERLYIGGPLTNSKGQNCGYRRCRASGVLTTSCGNTLTCYLKAAAACRAAKLQDCTMLVCGDDLVVICESAGTQEDEASLRAFTEAMTRYSAPPGDPPKPEYDLELITSCSSNVSVAHDASGKRVYYLTRDPTTPLARAAWETARHTPVNSWLGNIIMYAPTCWARAILMTHFFSILLAQEQLEKTLDCQIYGACYSIEPLDLPQIIQRLHGLSAFSLHSYSPGEDNRVTSCLRKLGIPPLRVWRHRARSVRARLLSQGGRAATCGKYLFNWAVRTKLKLTPIPAASQLDLSSWFVAGYSGGDIYHSLSRARPRWFMWCLLLLSVGVGIYLLPNR

SEQ ID NO: 202 - protein, 591 aa, Artificial Sequence
  Synthetic peptide
SMSYTWTGALITPCAAEETKLPINALSNSLLRHHNLVYATTSRSASLRQKKVTFDRLQVLDDHYRDVLKEMKAKASTVKAKLLSVEEACKLTPPHSARSKFGYGAKDVRNLSSKAVNHIRSVWKDLLEDTETPIDTTIMAKNEVFCVQPEKGGRKPARLIVFPDLGVRVCEKMALYDVVSTLPQAVMGSSYGFQYSPGQRVEFLVNAWKAKKCPMGFAYDTRCFDSTVTENDIRVEESIYQCCDLAPEARQAIRSLTERLYIGGPLTNSKGQNCGYRRCRASGVLTTSCGNTLTCYLKAAAACRAAKLQDCTMLVCGDDLVVICESAGTQEDEASLRAFTEAMTRYSAPPGDPPKPEYDLELITSCSSNVSVAHDASGKRVYYLTRDPTTPLARAAWETARHTPVNSWLGNIIMYAPTCWARAILMTHFFSILLAQEQLEKTLDCQIYGACYSIEPLDLPQIIQRLHGLSAFSLHSYSPGEDNRVSSCLRKLGIPPLRVWRHRARSVRARLLSQGGRAATCGKYLFNWAVRTKLKLTPIPAASQLDLSSWFVAGYSGGDIYHSLSRARPRWFMWCLLLLSVGVGIYLLPNR

SEQ ID NO: 203 - protein, 591 aa, Artificial Sequence
  Synthetic peptide
SMSYTWTGALITPCAAEETKLPINALSNSLLRHHNLVYATTSRSASLRQKKVTFDRLQVLDDHYRDVLKEMKAKASTVKAKLLSVEEACKLTPPHSARSKFGYGAKDVRNLSSKAVNHIRSVWKDLLEDTETPIDTTIMAKNEVFCVQPEKGGRKPARLIVFPDLGVRVCEKMALYDVVSTLPQAVMGSSYGFQYSPGQRVEFLVNAWKAKKCPMGFAYDTRCFDSTVTENDIRVEESIYQCCDLAPEARQAIRSLTERLYIGGPLTNSKGQNCGYRRCRASGVLTTSCGNTLTCYLKAAAACRAAKLQDCTMLVCGDDLVVICESAGTQEDEASLRAFTEAMTRYSAPPGDPPKPEYDLELITSCSSNVSVAHDASGKRVYYLTRDPTTPLARAAWETARHTPVNSWLGNIIMYAPTIWARMILMTHFFSILLAQEQLEKTLDCQIYGACYSIEPLDLPQIIQRLHGLSAFSLHSYSPGEINRVASCLRKLGVPPLRVWRHRARSVRARLLSQGGRAATCGKYLFNWAVRTKLKLTPIPAASQLDLSSWFVAGYSGGDIYHSLSRARPRWFMWCLLLLSVGVGIYLLPNR

SEQ ID NO: 204 - protein, 591 aa, Artificial Sequence
  Synthetic peptide
SMSYTWTGALITPCAAEETKLPINALSNSLLRHHNLVYATTSRSASLRQKKVTFDRLQVLDDHYRDVLKEMKAKASTVKAKLLSVEEACKLTPPHSARSKFGYGAKDVRNLSSKAVNHIRSVWKDLLEDTETPIDTTIMAKNEVFCVQPEKGGRKPARLIVFPDLGVRVCEKMALYDVVSTLPQAVMGSSYGFQYSPGQRVEFLVNAWKAKKCPMGFAYDTRCFDSTVTENDIRVEESIYQCCDLAPEARQAIRSLTERLYIGGPLTNSKGQNCGYRRCRASGVLTTSCGNTLTCYLKAAAACRAAKLQDCTMLVCGDDLVVICESAGTQEDEASLRAFTEAMTRYSAPPGDPPKPEYDLELITSCSSNVSVAHDASGKRVYYLTRDPTTPLARAAWETARHTPVNSWLGNIIMYAPTIWARMILMTHFFSILLAQEQLEKTLDCQIYGACYSIEPLDLPQIIQRLHGLSAFSLHSYSPGEINRVVSCLRKLGVPPLRVWRHRARSVRARLLSQGGRAATCGKYLFNWAVRTKLKLTPIPAASQLDLSSWFVAGYSGGDIYHSLSRARPRWFMWCLLLLSVGVGIYLLPNR

SEQ ID NO: 205 - protein, 591 aa, Artificial Sequence
  Synthetic peptid
SMSYTWTGALITPCAAEETKLPINALSNSLLRHHNLVYATTSRSASLRQKKVTFDRLQVLDDHYRDVLKEMKAKASTVKAKLLSVEEACKLTPPHSARSKFGYGAKDVRNLSSKAVNHIRSVWKDLLEDTETPIDTTIMAKNEVFCVQPEKGGRKPARLIVFPDLGVRVCEKMALYDVVSTLPQAVMGSSYGFQYSPGQRVEFLVNAWKAKKCPMGFAYDTRCFDSTVTENDIRVEESIYQCCDLAPEARQAIRSLTERLYIGGPLTNSKGQNCGYRRCRASGVLTTSCGNTLTCYLKAAAACRAAKLQDCTMLVCGDDLVVICESAGTQEDEASLRAFTEAMTRYSAPPGDPPKPEYDLELITSCSSNVSVAHDASGKRVYYLTRDPTTPLARAAWETARHTPVNSWLGNIIMYAPTIWARMILMTHFFSILLAQEQLEKTLDCQIYGACYSIEPLDLPQIIQRLHGLSAFSLHSYSPGEINRVISCLRKLGVPPLRVWRHRARSVRARLLSQGGRAATCGKYLFNWAVRTKLKLTPIPAASQLDLSSWFVAGYSGGDIYHSLSRARPRWFMWCLLLLSVGVGIYLLPNR

SEQ ID NO: 206 - protein, 591 aa, Artificial Sequence
  Synthetic peptide
SMSYTWTGALITPCAAEETKLPINALSNSLLRHHNLVYATTSRSASLRQKKVTFDRLQVLDDHYRDVLKEMKAKASTVKAKLLSVEEACKLTPPHSARSKFGYGAKDVRNLSSKAVNHIRSVWKDLLEDTETPIDTTIMAKNEVFCVQPEKGGRKPARLIVFPDLGVRVCEKMALYDVVSTLPQAVMGSSYGFQYSPGQRVEFLVNAWKAKKCPMGFAYDTRCFDSTVTENDIRVEESIYQCCDLAPEARQAIRSLTERLYIGGPLTNSKGQNCGYRRCRASGVLTTSCGNTLTCYLKAAAACRAAKLQDCTMLVCGDDLVVICESAGTQEDEASLRAFTEAMTRYSAPPGDPPKPEYDLELITSCSSNVSVAHDASGKRVYYLTRDPTTPLARAAWETARHTPVNSWLGNIIMYAPTIWARMILMTHFFSILLAQEQLEKTLDCQIYGACYSIEPLDLPQIIQRLHGLSAFSLHSYSPGEINRVTSCLRKLGVPPLRVWRHRARSVRARLLSQGGRAATCGKYLFNWAVRTKLKLTPIPAASQLDLSSWFVAGYSGGDIYHSLSRARPRWFMWCLLLLSVGVGIYLLPNR

SEQ ID NO: 207 - protein, 591 aa, Artificial Sequence
  Synthetic peptide
SMSYTWTGALITPCAAEETKLPINALSNSLLRHHNLVYATTSRSASLRQKKVTFDRLQVLDDHYRDVLKEMKAKASTVKAKLLSVEEACKLTPPHSARSKFGYGAKDVRNLSSKAVNHIRSVWKDLLEDTETPIDTTIMAKNEVFCVQPEKGGRKPARLIVFPDLGVRVCEKMALYDVVSTLPQAVMGSSYGFQYSPGQRVEFLVNAWKAKKCPMGFAYDTRCFDSTVTENDIRVEESIYQCCDLAPEARQAIRSLTERLYIGGPLTNSKGQNCGYRRCRASGVLTTSCGNTLTCYLKAAAACRAAKLQDCTMLVCGDDLVVICESAGTQEDEASLRAFTEAMTRYSAPPGDPPKPEYDLELITSCSSNVSVAHDASGKRVYYLTRDPTTPLARAAWETARHTPVNSWLGNIIMYAPTIWARMILMTHFFSILLAQEQLEKTLDCQIYGACYSIEPLDLPQIIQRLHGLSAFSLHSYSPGEINRVSSCLRKLGVPPLRVWRHRARSVRARLLSQGGRAATCGKYLFNWAVRTKLKLTPIPAASQLDLSSWFVAGYSGGDIYHSLSRARPRWFMWCLLLLSVGVGIYLLPNR

SEQ ID NO: 208 - protein, 591 aa, Artificial Sequence
  Synthetic peptide
SMSYTWTGALITPCAAEETKLPINALSNSLLRHHNLVYATTSRSASLRQKKVTFDRLQVLDDHYRDVLKEMKAKASTVKAKLLSVEEACKLTPPHSARSKFGYGAKDVRNLSSKAVNHIRSVWKDLLEDTETPIDTTIMAKNEVFCVQPEKGGRKPARLIVFPDLGVRVCEKMALYDVVSTLPQAVMGSSYGFQYSPGQRVEFLVNAWKAKKCPMGFAYDTRCFDSTVTENDIRVEESIYQCCDLAPEARQAIRSLTERLYIGGPLTNSKGQNCGYRRCRASGVLTTSCGNTLTCYLKAAAACRAAKLQDCTMLVCGDDLVVICESAGTQEDEASLRAFTEAMTRYSAPPGDPPKPEYDLELITSCSSNVSVAHDASGKRVYYLTRDPTTPLARAAWETARHTPVNSWLGNIIMYAPTIWARMILMTHFFSILLAQEQLEKTLDCQIYGACYSIEPLDLPQIIQRLHGLSAFSLHSYSPGEINRVASCLRKLGIPPLRVWRHRARSVRARLLSQGGRAATCGKYLFNWAVRTKLKLTPIPAASQLDLSSWFVAGYSGGDIYHSLSRARPRWFMWCLLLLSVGVGIYLLPNR

SEQ ID NO: 209 - protein, 591 aa, Artificial Sequence
  Synthetic peptide
SMSYTWTGALITPCAAEETKLPINALSNSLLRHHNLVYATTSRSASLRQKKVTFDRLQVLDDHYRDVLKEMKAKASTVKAKLLSVEEACKLTPPHSARSKFGYGAKDVRNLSSKAVNHIRSVWKDLLEDTETPIDTTIMAKNEVFCVQPEKGGRKPARLIVFPDLGVRVCEKMALYDVVSTLPQAVMGSSYGFQYSPGQRVEFLVNAWKAKKCPMGFAYDTRCFDSTVTENDIRVEESIYQCCDLAPEARQAIRSLTERLYIGGPLTNSKGQNCGYRRCRASGVLTTSCGNTLTCYLKAAAACRAAKLQDCTMLVCGDDLVVICESAGTQEDEASLRAFTEAMTRYSAPPGDPPKPEYDLELITSCSSNVSVAHDASGKRVYYLTRDPTTPLARAAWETARHTPVNSWLGNIIMYAPTIWARMILMTHFFSILLAQEQLEKTLDCQIYGACYSIEPLDLPQIIQRLHGLSAFSLHSYSPGEINRVVSCLRKLGIPPLRVWRHRARSVRARLLSQGGRAATCGKYLFNWAVRTKLKLTPIPAASQLDLSSWFVAGYSGGDIYHSLSRARPRWFMWCLLLLSVGVGIYLLPNR

SEQ ID NO: 210 - protein, 591 aa, Artificial Sequence
  Synthetic peptide
SMSYTWTGALITPCAAEETKLPINALSNSLLRHHNLVYATTSRSASLRQKKVTFDRLQVLDDHYRDVLKEMKAKASTVKAKLLSVEEACKLTPPHSARSKFGYGAKDVRNLSSKAVNHIRSVWKDLLEDTETPIDTTIMAKNEVFCVQPEKGGRKPARLIVFPDLGVRVCEKMALYDVVSTLPQAVMGSSYGFQYSPGQRVEFLVNAWKAKKCPMGFAYDTRCFDSTVTENDIRVEESIYQCCDLAPEARQAIRSLTERLYIGGPLTNSKGQNCGYRRCRASGVLTTSCGNTLTCYLKAAAACRAAKLQDCTMLVCGDDLVVICESAGTQEDEASLRAFTEAMTRYSAPPGDPPKPEYDLELITSCSSNVSVAHDASGKRVYYLTRDPTTPLARAAWETARHTPVNSWLGNIIMYAPTIWARMILMTHFFSILLAQEQLEKTLDCQIYGACYSIEPLDLPQIIQRLHGLSAFSLHSYSPGEINRVISCLRKLGIPPLRVWRHRARSVRARLLSQGGRAATCGKYLFNWAVRTKLKLTPIPAASQLDLSSWFVAGYSGGDIYHSLSRARPRWFMWCLLLLSVGVGIYLLPNR

SEQ ID NO: 211 - protein, 591 aa, Artificial Sequence
  Synthetic peptide
SMSYTWTGALITPCAAEETKLPINALSNSLLRHHNLVYATTSRSASLRQKKVTFDRLQVLDDHYRDVLKEMKAKASTVKAKLLSVEEACKLTPPHSARSKFGYGAKDVRNLSSKAVNHIRSVWKDLLEDTETPIDTTIMAKNEVFCVQPEKGGRKPARLIVFPDLGVRVCEKMALYDVVSTLPQAVMGSSYGFQYSPGQRVEFLVNAWKAKKCPMGFAYDTRCFDSTVTENDIRVEESIYQCCDLAPEARQAIRSLTERLYIGGPLTNSKGQNCGYRRCRASGVLTTSCGNTLTCYLKAAAACRAAKLQDCTMLVCGDDLVVICESAGTQEDEASLRAFTEAMTRYSAPPGDPPKPEYDLELITSCSSNVSVAHDASGKRVYYLTRDPTTPLARAAWETARHTPVNSWLGNIIMYAPTIWARMILMTHFFSILLAQEQLEKTLDCQIYGACYSIEPLDLPQIIQRLHGLSAFSLHSYSPGEINRVTSCLRKLGIPPLRVWRHRARSVRARLLSQGGRAATCGKYLFNWAVRTKLKLTPIPAASQLDLSSWFVAGYSGGDIYHSLSRARPRWFMWCLLLLSVGVGIYLLPNR

SEQ ID NO: 212 - protein, 591 aa, Artificial Sequence
  Synthetic peptide
SMSYTWTGALITPCAAEETKLPINALSNSLLRHHNLVYATTSRSASLRQKKVTFDRLQVLDDHYRDVLKEMKAKASTVKAKLLSVEEACKLTPPHSARSKFGYGAKDVRNLSSKAVNHIRSVWKDLLEDTETPIDTTIMAKNEVFCVQPEKGGRKPARLIVFPDLGVRVCEKMALYDVVSTLPQAVMGSSYGFQYSPGQRVEFLVNAWKAKKCPMGFAYDTRCFDSTVTENDIRVEESIYQCCDLAPEARQAIRSLTERLYIGGPLTNSKGQNCGYRRCRASGVLTTSCGNTLTCYLKAAAACRAAKLQDCTMLVCGDDLVVICESAGTQEDEASLRAFTEAMTRYSAPPGDPPKPEYDLELITSCSSNVSVAHDASGKRVYYLTRDPTTPLARAAWETARHTPVNSWLGNIIMYAPTIWARMILMTHFFSILLAQEQLEKTLDCQIYGACYSIEPLDLPQIIQRLHGLSAFSLHSYSPGEINRVSSCLRKLGIPPLRVWRHRARSVRARLLSQGGRAATCGKYLFNWAVRTKLKLTPIPAASQLDLSSWFVAGYSGGDIYHSLSRARPRWFMWCLLLLSVGVGIYLLPNR

SEQ ID NO: 213 - protein, 591 aa, Artificial Sequence
  Synthetic peptide
SMSYTWTGALITPCAAEETKLPINALSNSLLRHHNLVYATTSRSASLRQKKVTFDRLQVLDDHYRDVLKEMKAKASTVKAKLLSVEEACKLTPPHSARSKFGYGAKDVRNLSSKAVNHIRSVWKDLLEDTETPIDTTIMAKNEVFCVQPEKGGRKPARLIVFPDLGVRVCEKMALYDVVSTLPQAVMGSSYGFQYSPGQRVEFLVNAWKAKKCPMGFAYDTRCFDSTVTENDIRVEESIYQCCDLAPEARQAIRSLTERLYIGGPLTNSKGQNCGYRRCRASGVLTTSCGNTLTCYLKAAAACRAAKLQDCTMLVCGDDLVVICESAGTQEDEASLRAFTEAMTRYSAPPGDPPKPEYDLELITSCSSNVSVAHDASGKRVYYLTRDPTTPLARAAWETARHTPVNSWLGNIIMYAPTIWARAILMTHFFSILLAQEQLEKTLDCQIYGACYSIEPLDLPQIIQRLHGLSAFSLHSYSPGEINRVASCLRKLGVPPLRVWRHRARSVRARLLSQGGRAATCGKYLFNWAVRTKLKLTPIPAASQLDLSSWFVAGYSGGDIYHSLSRARPRWFMWCLLLLSVGVGIYLLPNR

SEQ ID NO: 214 - protein, 591 aa, Artificial Sequence
  Synthetic peptide
SMSYTWTGALITPCAAEETKLPINALSNSLLRHHNLVYATTSRSASLRQKKVTFDRLQVLDDHYRDVLKEMKAKASTVKAKLLSVEEACKLTPPHSARSKFGYGAKDVRNLSSKAVNHIRSVWKDLLEDTETPIDTTIMAKNEVFCVQPEKGGRKPARLIVFPDLGVRVCEKMALYDVVSTLPQAVMGSSYGFQYSPGQRVEFLVNAWKAKKCPMGFAYDTRCFDSTVTENDIRVEESIYQCCDLAPEARQAIRSLTERLYIGGPLTNSKGQNCGYRRCRASGVLTTSCGNTLTCYLKAAAACRAAKLQDCTMLVCGDDLVVICESAGTQEDEASLRAFTEAMTRYSAPPGDPPKPEYDLELITSCSSNVSVAHDASGKRVYYLTRDPTTPLARAAWETARHTPVNSWLGNIIMYAPTIWARAILMTHFFSILLAQEQLEKTLDCQIYGACYSIEPLDLPQIIQRLHGLSAFSLHSYSPGEINRVVSCLRKLGVPPLRVWRHRARSVRARLLSQGGRAATCGKYLFNWAVRTKLKLTPIPAASQLDLSSWFVAGYSGGDIYHSLSRARPRWFMWCLLLLSVGVGIYLLPNR

SEQ ID NO: 215 - protein, 591 aa, Artificial Sequence
  Synthetic peptide
SMSYTWTGALITPCAAEETKLPINALSNSLLRHHNLVYATTSRSASLRQKKVTFDRLQVLDDHYRDVLKEMKAKASTVKAKLLSVEEACKLTPPHSARSKFGYGAKDVRNLSSKAVNHIRSVWKDLLEDTETPIDTTIMAKNEVFCVQPEKGGRKPARLIVFPDLGVRVCEKMALYDVVSTLPQAVMGSSYGFQYSPGQRVEFLVNAWKAKKCPMGFAYDTRCFDSTVTENDIRVEESIYQCCDLAPEARQAIRSLTERLYIGGPLTNSKGQNCGYRRCRASGVLTTSCGNTLTCYLKAAAACRAAKLQDCTMLVCGDDLVVICESAGTQEDEASLRAFTEAMTRYSAPPGDPPKPEYDLELITSCSSNVSVAHDASGKRVYYLTRDPTTPLARAAWETARHTPVNSWLGNIIMYAPTIWARAILMTHFFSILLAQEQLEKTLDCQIYGACYSIEPLDLPQIIQRLHGLSAFSLHSYSPGEINRVISCLRKLGVPPLRVWRHRARSVRARLLSQGGRAATCGKYLFNWAVRTKLKLTPIPAASQLDLSSWFVAGYSGGDIYHSLSRARPRWFMWCLLLLSVGVGIYLLPNR

SEQ ID NO: 216 - protein, 591 aa, Artificial Sequence
  Synthetic peptide
SMSYTWTGALITPCAAEETKLPINALSNSLLRHHNLVYATTSRSASLRQKKVTFDRLQVLDDHYRDVLKEMKAKASTVKAKLLSVEEACKLTPPHSARSKFGYGAKDVRNLSSKAVNHIRSVWKDLLEDTETPIDTTIMAKNEVFCVQPEKGGRKPARLIVFPDLGVRVCEKMALYDVVSTLPQAVMGSSYGFQYSPGQRVEFLVNAWKAKKCPMGFAYDTRCFDSTVTENDIRVEESIYQCCDLAPEARQAIRSLTERLYIGGPLTNSKGQNCGYRRCRASGVLTTSCGNTLTCYLKAAAACRAAKLQDCTMLVCGDDLVVICESAGTQEDEASLRAFTEAMTRYSAPPGDPPKPEYDLELITSCSSNVSVAHDASGKRVYYLTRDPTTPLARAAWETARHTPVNSWLGNIIMYAPTIWARAILMTHFFSILLAQEQLEKTLDCQIYGACYSIEPLDLPQIIQRLHGLSAFSLHSYSPGEINRVTSCLRKLGVPPLRVWRHRARSVRARLLSQGGRAATCGKYLFNWAVRTKLKLTPIPAASQLDLSSWFVAGYSGGDIYHSLSRARPRWFMWCLLLLSVGVGIYLLPNR

SEQ ID NO: 217 - protein, 591 aa, Artificial Sequence
  Synthetic peptide
SMSYTWTGALITPCAAEETKLPINALSNSLLRHHNLVYATTSRSASLRQKKVTFDRLQVLDDHYRDVLKEMKAKASTVKAKLLSVEEACKLTPPHSARSKFGYGAKDVRNLSSKAVNHIRSVWKDLLEDTETPIDTTIMAKNEVFCVQPEKGGRKPARLIVFPDLGVRVCEKMALYDVVSTLPQAVMGSSYGFQYSPGQRVEFLVNAWKAKKCPMGFAYDTRCFDSTVTENDIRVEESIYQCCDLAPEARQAIRSLTERLYIGGPLTNSKGQNCGYRRCRASGVLTTSCGNTLTCYLKAAAACRAAKLQDCTMLVCGDDLVVICESAGTQEDEASLRAFTEAMTRYSAPPGDPPKPEYDLELITSCSSNVSVAHDASGKRVYYLTRDPTTPLARAAWETARHTPVNSWLGNIIMYAPTIWARAILMTHFFSILLAQEQLEKTLDCQIYGACYSIEPLDLPQIIQRLHGLSAFSLHSYSPGEINRVSSCLRKLGVPPLRVWRHRARSVRARLLSQGGRAATCGKYLFNWAVRTKLKLTPIPAASQLDLSSWFVAGYSGGDIYHSLSRARPRWFMWCLLLLSVGVGIYLLPNR

SEQ ID NO: 218 - protein, 591 aa, Artificial Sequence
  Synthetic peptide
SMSYTWTGALITPCAAEETKLPINALSNSLLRHHNLVYATTSRSASLRQKKVTFDRLQVLDDHYRDVLKEMKAKASTVKAKLLSVEEACKLTPPHSARSKFGYGAKDVRNLSSKAVNHIRSVWKDLLEDTETPIDTTIMAKNEVFCVQPEKGGRKPARLIVFPDLGVRVCEKMALYDVVSTLPQAVMGSSYGFQYSPGQRVEFLVNAWKAKKCPMGFAYDTRCFDSTVTENDIRVEESIYQCCDLAPEARQAIRSLTERLYIGGPLTNSKGQNCGYRRCRASGVLTTSCGNTLTCYLKAAAACRAAKLQDCTMLVCGDDLVVICESAGTQEDEASLRAFTEAMTRYSAPPGDPPKPEYDLELITSCSSNVSVAHDASGKRVYYLTRDPTTPLARAAWETARHTPVNSWLGNIIMYAPTIWARAILMTHFFSILLAQEQLEKTLDCQIYGACYSIEPLDLPQIIQRLHGLSAFSLHSYSPGEINRVASCLRKLGIPPLRVWRHRARSVRARLLSQGGRAATCGKYLFNWAVRTKLKLTPIPAASQLDLSSWFVAGYSGGDIYHSLSRARPRWFMWCLLLLSVGVGIYLLPNR

SEQ ID NO: 219 - protein, 591 aa, Artificial Sequence
  Synthetic peptide
SMSYTWTGALITPCAAEETKLPINALSNSLLRHHNLVYATTSRSASLRQKKVTFDRLQVLDDHYRDVLKEMKAKASTVKAKLLSVEEACKLTPPHSARSKFGYGAKDVRNLSSKAVNHIRSVWKDLLEDTETPIDTTIMAKNEVFCVQPEKGGRKPARLIVFPDLGVRVCEKMALYDVVSTLPQAVMGSSYGFQYSPGQRVEFLVNAWKAKKCPMGFAYDTRCFDSTVTENDIRVEESIYQCCDLAPEARQAIRSLTERLYIGGPLTNSKGQNCGYRRCRASGVLTTSCGNTLTCYLKAAAACRAAKLQDCTMLVCGDDLVVICESAGTQEDEASLRAFTEAMTRYSAPPGDPPKPEYDLELITSCSSNVSVAHDASGKRVYYLTRDPTTPLARAAWETARHTPVNSWLGNIIMYAPTIWARAILMTHFFSILLAQEQLEKTLDCQIYGACYSIEPLDLPQIIQRLHGLSAFSLHSYSPGEINRVVSCLRKLGIPPLRVWRHRARSVRARLLSQGGRAATCGKYLFNWAVRTKLKLTPIPAASQLDLSSWFVAGYSGGDIYHSLSRARPRWFMWCLLLLSVGVGIYLLPNR

SEQ ID NO: 220 - protein, 591 aa, Artificial Sequence
  Synthetic peptide
SMSYTWTGALITPCAAEETKLPINALSNSLLRHHNLVYATTSRSASLRQKKVTFDRLQVLDDHYRDVLKEMKAKASTVKAKLLSVEEACKLTPPHSARSKFGYGAKDVRNLSSKAVNHIRSVWKDLLEDTETPIDTTIMAKNEVFCVQPEKGGRKPARLIVFPDLGVRVCEKMALYDVVSTLPQAVMGSSYGFQYSPGQRVEFLVNAWKAKKCPMGFAYDTRCFDSTVTENDIRVEESIYQCCDLAPEARQAIRSLTERLYIGGPLTNSKGQNCGYRRCRASGVLTTSCGNTLTCYLKAAAACRAAKLQDCTMLVCGDDLVVICESAGTQEDEASLRAFTEAMTRYSAPPGDPPKPEYDLELITSCSSNVSVAHDASGKRVYYLTRDPTTPLARAAWETARHTPVNSWLGNIIMYAPTIWARAILMTHFFSILLAQEQLEKTLDCQIYGACYSIEPLDLPQIIQRLHGLSAFSLHSYSPGEINRVISCLRKLGIPPLRVWRHRARSVRARLLSQGGRAATCGKYLFNWAVRTKLKLTPIPAASQLDLSSWFVAGYSGGDIYHSLSRARPRWFMWCLLLLSVGVGIYLLPNR

SEQ ID NO: 221 - protein, 591 aa, Artificial Sequence
  Synthetic peptide
SMSYTWTGALITPCAAEETKLPINALSNSLLRHHNLVYATTSRSASLRQKKVTFDRLQVLDDHYRDVLKEMKAKASTVKAKLLSVEEACKLTPPHSARSKFGYGAKDVRNLSSKAVNHIRSVWKDLLEDTETPIDTTIMAKNEVFCVQPEKGGRKPARLIVFPDLGVRVCEKMALYDVVSTLPQAVMGSSYGFQYSPGQRVEFLVNAWKAKKCPMGFAYDTRCFDSTVTENDIRVEESIYQCCDLAPEARQAIRSLTERLYIGGPLTNSKGQNCGYRRCRASGVLTTSCGNTLTCYLKAAAACRAAKLQDCTMLVCGDDLVVICESAGTQEDEASLRAFTEAMTRYSAPPGDPPKPEYDLELITSCSSNVSVAHDASGKRVYYLTRDPTTPLARAAWETARHTPVNSWLGNIIMYAPTIWARAILMTHFFSILLAQEQLEKTLDCQIYGACYSIEPLDLPQIIQRLHGLSAFSLHSYSPGEINRVTSCLRKLGIPPLRVWRHRARSVRARLLSQGGRAATCGKYLFNWAVRTKLKLTPIPAASQLDLSSWFVAGYSGGDIYHSLSRARPRWFMWCLLLLSVGVGIYLLPNR

SEQ ID NO: 222 - protein, 591 aa, Artificial Sequence
  Synthetic peptide
SMSYTWTGALITPCAAEETKLPINALSNSLLRHHNLVYATTSRSASLRQKKVTFDRLQVLDDHYRDVLKEMKAKASTVKAKLLSVEEACKLTPPHSARSKFGYGAKDVRNLSSKAVNHIRSVWKDLLEDTETPIDTTIMAKNEVFCVQPEKGGRKPARLIVFPDLGVRVCEKMALYDVVSTLPQAVMGSSYGFQYSPGQRVEFLVNAWKAKKCPMGFAYDTRCFDSTVTENDIRVEESIYQCCDLAPEARQAIRSLTERLYIGGPLTNSKGQNCGYRRCRASGVLTTSCGNTLTCYLKAAAACRAAKLQDCTMLVCGDDLVVICESAGTQEDEASLRAFTEAMTRYSAPPGDPPKPEYDLELITSCSSNVSVAHDASGKRVYYLTRDPTTPLARAAWETARHTPVNSWLGNIIMYAPTIWARAILMTHFFSILLAQEQLEKTLDCQIYGACYSIEPLDLPQIIQRLHGLSAFSLHSYSPGEINRVSSCLRKLGIPPLRVWRHRARSVRARLLSQGGRAATCGKYLFNWAVRTKLKLTPIPAASQLDLSSWFVAGYSGGDIYHSLSRARPRWFMWCLLLLSVGVGIYLLPNR

SEQ ID NO: 223 - protein, 591 aa, Artificial Sequence
  Synthetic peptide
SMSYTWTGALITPCAAEETKLPINALSNSLLRHHNLVYATTSRSASLRQKKVTFDRLQVLDDHYRDVLKEMKAKASTVKAKLLSVEEACKLTPPHSARSKFGYGAKDVRNLSSKAVNHIRSVWKDLLEDTETPIDTTIMAKNEVFCVQPEKGGRKPARLIVFPDLGVRVCEKMALYDVVSTLPQAVMGSSYGFQYSPGQRVEFLVNAWKAKKCPMGFAYDTRCFDSTVTENDIRVEESIYQCCDLAPEARQAIRSLTERLYIGGPLTNSKGQNCGYRRCRASGVLTTSCGNTLTCYLKAAAACRAAKLQDCTMLVCGDDLVVICESAGTQEDEASLRAFTEAMTRYSAPPGDPPKPEYDLELITSCSSNVSVAHDASGKRVYYLTRDPTTPLARAAWETARHTPVNSWLGNIIMYAPTIWARMILMTHFFSILLAQEQLEKTLDCQIYGACYSIEPLDLPQIIQRLHGLSAFSLHSYSPGEANRVASCLRKLGVPPLRVWRHRARSVRARLLSQGGRAATCGKYLFNWAVRTKLKLTPIPAASQLDLSSWFVAGYSGGDIYHSLSRARPRWFMWCLLLLSVGVGIYLLPNR

SEQ ID NO: 224 - protein, 591 aa, Artificial Sequence
  Synthetic peptide
SMSYTWTGALITPCAAEETKLPINALSNSLLRHHNLVYATTSRSASLRQKKVTFDRLQVLDDHYRDVLKEMKAKASTVKAKLLSVEEACKLTPPHSARSKFGYGAKDVRNLSSKAVNHIRSVWKDLLEDTETPIDTTIMAKNEVFCVQPEKGGRKPARLIVFPDLGVRVCEKMALYDVVSTLPQAVMGSSYGFQYSPGQRVEFLVNAWKAKKCPMGFAYDTRCFDSTVTENDIRVEESIYQCCDLAPEARQAIRSLTERLYIGGPLTNSKGQNCGYRRCRASGVLTTSCGNTLTCYLKAAAACRAAKLQDCTMLVCGDDLVVICESAGTQEDEASLRAFTEAMTRYSAPPGDPPKPEYDLELITSCSSNVSVAHDASGKRVYYLTRDPTTPLARAAWETARHTPVNSWLGNIIMYAPTIWARMILMTHFFSILLAQEQLEKTLDCQIYGACYSIEPLDLPQIIQRLHGLSAFSLHSYSPGEANRVVSCLRKLGVPPLRVWRHRARSVRARLLSQGGRAATCGKYLFNWAVRTKLKLTPIPAASQLDLSSWFVAGYSGGDIYHSLSRARPRWFMWCLLLLSVGVGIYLLPNR

SEQ ID NO: 225 - protein, 591 aa, Artificial Sequence
  Synthetic peptide
SMSYTWTGALITPCAAEETKLPINALSNSLLRHHNLVYATTSRSASLRQKKVTFDRLQVLDDHYRDVLKEMKAKASTVKAKLLSVEEACKLTPPHSARSKFGYGAKDVRNLSSKAVNHIRSVWKDLLEDTETPIDTTIMAKNEVFCVQPEKGGRKPARLIVFPDLGVRVCEKMALYDVVSTLPQAVMGSSYGFQYSPGQRVEFLVNAWKAKKCPMGFAYDTRCFDSTVTENDIRVEESIYQCCDLAPEARQAIRSLTERLYIGGPLTNSKGQNCGYRRCRASGVLTTSCGNTLTCYLKAAAACRAAKLQDCTMLVCGDDLVVICESAGTQEDEASLRAFTEAMTRYSAPPGDPPKPEYDLELITSCSSNVSVAHDASGKRVYYLTRDPTTPLARAAWETARHTPVNSWLGNIIMYAPTIWARMILMTHFFSILLAQEQLEKTLDCQIYGACYSIEPLDLPQIIQRLHGLSAFSLHSYSPGEANRVISCLRKLGVPPLRVWRHRARSVRARLLSQGGRAATCGKYLFNWAVRTKLKLTPIPAASQLDLSSWFVAGYSGGDIYHSLSRARPRWFMWCLLLLSVGVGIYLLPNR

SEQ ID NO: 226 - protein, 591 aa, Artificial Sequence
  Synthetic peptide
SMSYTWTGALITPCAAEETKLPINALSNSLLRHHNLVYATTSRSASLRQKKVTFDRLQVLDDHYRDVLKEMKAKASTVKAKLLSVEEACKLTPPHSARSKFGYGAKDVRNLSSKAVNHIRSVWKDLLEDTETPIDTTIMAKNEVFCVQPEKGGRKPARLIVFPDLGVRVCEKMALYDVVSTLPQAVMGSSYGFQYSPGQRVEFLVNAWKAKKCPMGFAYDTRCFDSTVTENDIRVEESIYQCCDLAPEARQAIRSLTERLYIGGPLTNSKGQNCGYRRCRASGVLTTSCGNTLTCYLKAAAACRAAKLQDCTMLVCGDDLVVICESAGTQEDEASLRAFTEAMTRYSAPPGDPPKPEYDLELITSCSSNVSVAHDASGKRVYYLTRDPTTPLARAAWETARHTPVNSWLGNIIMYAPTIWARMILMTHFFSILLAQEQLEKTLDCQIYGACYSIEPLDLPQIIQRLHGLSAFSLHSYSPGEANRVTSCLRKLGVPPLRVWRHRARSVRARLLSQGGRAATCGKYLFNWAVRTKLKLTPIPAASQLDLSSWFVAGYSGGDIYHSLSRARPRWFMWCLLLLSVGVGIYLLPNR

SEQ ID NO: 227 - protein, 591 aa, Artificial Sequence
  Synthetic peptide
SMSYTWTGALITPCAAEETKLPINALSNSLLRHHNLVYATTSRSASLRQKKVTFDRLQVLDDHYRDVLKEMKAKASTVKAKLLSVEEACKLTPPHSARSKFGYGAKDVRNLSSKAVNHIRSVWKDLLEDTETPIDTTIMAKNEVFCVQPEKGGRKPARLIVFPDLGVRVCEKMALYDVVSTLPQAVMGSSYGFQYSPGQRVEFLVNAWKAKKCPMGFAYDTRCFDSTVTENDIRVEESIYQCCDLAPEARQAIRSLTERLYIGGPLTNSKGQNCGYRRCRASGVLTTSCGNTLTCYLKAAAACRAAKLQDCTMLVCGDDLVVICESAGTQEDEASLRAFTEAMTRYSAPPGDPPKPEYDLELITSCSSNVSVAHDASGKRVYYLTRDPTTPLARAAWETARHTPVNSWLGNIIMYAPTIWARMILMTHFFSILLAQEQLEKTLDCQIYGACYSIEPLDLPQIIQRLHGLSAFSLHSYSPGEANRVSSCLRKLGVPPLRVWRHRARSVRARLLSQGGRAATCGKYLFNWAVRTKLKLTPIPAASQLDLSSWFVAGYSGGDIYHSLSRARPRWFMWCLLLLSVGVGIYLLPNR

SEQ ID NO: 228 - protein, 591 aa, Artificial Sequence
  Synthetic peptide
SMSYTWTGALITPCAAEETKLPINALSNSLLRHHNLVYATTSRSASLRQKKVTFDRLQVLDDHYRDVLKEMKAKASTVKAKLLSVEEACKLTPPHSARSKFGYGAKDVRNLSSKAVNHIRSVWKDLLEDTETPIDTTIMAKNEVFCVQPEKGGRKPARLIVFPDLGVRVCEKMALYDVVSTLPQAVMGSSYGFQYSPGQRVEFLVNAWKAKKCPMGFAYDTRCFDSTVTENDIRVEESIYQCCDLAPEARQAIRSLTERLYIGGPLTNSKGQNCGYRRCRASGVLTTSCGNTLTCYLKAAAACRAAKLQDCTMLVCGDDLVVICESAGTQEDEASLRAFTEAMTRYSAPPGDPPKPEYDLELITSCSSNVSVAHDASGKRVYYLTRDPTTPLARAAWETARHTPVNSWLGNIIMYAPTIWARMILMTHFFSILLAQEQLEKTLDCQIYGACYSIEPLDLPQIIQRLHGLSAFSLHSYSPGEANRVASCLRKLGIPPLRVWRHRARSVRARLLSQGGRAATCGKYLFNWAVRTKLKLTPIPAASQLDLSSWFVAGYSGGDIYHSLSRARPRWFMWCLLLLSVGVGIYLLPNR

SEQ ID NO: 229 - protein, 591 aa, Artificial Sequence
  Sythetic peptide
SMSYTWTGALITPCAAEETKLPINALSNSLLRHHNLVYATTSRSASLRQKKVTFDRLQVLDDHYRDVLKEMKAKASTVKAKLLSVEEACKLTPPHSARSKFGYGAKDVRNLSSKAVNHIRSVWKDLLEDTETPIDTTIMAKNEVFCVQPEKGGRKPARLIVFPDLGVRVCEKMALYDVVSTLPQAVMGSSYGFQYSPGQRVEFLVNAWKAKKCPMGFAYDTRCFDSTVTENDIRVEESIYQCCDLAPEARQAIRSLTERLYIGGPLTNSKGQNCGYRRCRASGVLTTSCGNTLTCYLKAAAACRAAKLQDCTMLVCGDDLVVICESAGTQEDEASLRAFTEAMTRYSAPPGDPPKPEYDLELITSCSSNVSVAHDASGKRVYYLTRDPTTPLARAAWETARHTPVNSWLGNIIMYAPTIWARMILMTHFFSILLAQEQLEKTLDCQIYGACYSIEPLDLPQIIQRLHGLSAFSLHSYSPGEANRVVSCLRKLGIPPLRVWRHRARSVRARLLSQGGRAATCGKYLFNWAVRTKLKLTPIPAASQLDLSSWFVAGYSGGDIYHSLSRARPRWFMWCLLLLSVGVGIYLLPNR

SEQ ID NO: 230 - protein, 591 aa, Artificial Sequence
  Synthetic peptide
SMSYTWTGALITPCAAEETKLPINALSNSLLRHHNLVYATTSRSASLRQKKVTFDRLQVLDDHYRDVLKEMKAKASTVKAKLLSVEEACKLTPPHSARSKFGYGAKDVRNLSSKAVNHIRSVWKDLLEDTETPIDTTIMAKNEVFCVQPEKGGRKPARLIVFPDLGVRVCEKMALYDVVSTLPQAVMGSSYGFQYSPGQRVEFLVNAWKAKKCPMGFAYDTRCFDSTVTENDIRVEESIYQCCDLAPEARQAIRSLTERLYIGGPLTNSKGQNCGYRRCRASGVLTTSCGNTLTCYLKAAAACRAAKLQDCTMLVCGDDLVVICESAGTQEDEASLRAFTEAMTRYSAPPGDPPKPEYDLELITSCSSNVSVAHDASGKRVYYLTRDPTTPLARAAWETARHTPVNSWLGNIIMYAPTIWARMILMTHFFSILLAQEQLEKTLDCQIYGACYSIEPLDLPQIIQRLHGLSAFSLHSYSPGEANRVISCLRKLGIPPLRVWRHRARSVRARLLSQGGRAATCGKYLFNWAVRTKLKLTPIPAASQLDLSSWFVAGYSGGDIYHSLSRARPRWFMWCLLLLSVGVGIYLLPNR

SEQ ID NO: 231 - protein, 591 aa, Artificial Sequence
  Synthetic peptide
SMSYTWTGALITPCAAEETKLPINALSNSLLRHHNLVYATTSRSASLRQKKVTFDRLQVLDDHYRDVLKEMKAKASTVKAKLLSVEEACKLTPPHSARSKFGYGAKDVRNLSSKAVNHIRSVWKDLLEDTETPIDTTIMAKNEVFCVQPEKGGRKPARLIVFPDLGVRVCEKMALYDVVSTLPQAVMGSSYGFQYSPGQRVEFLVNAWKAKKCPMGFAYDTRCFDSTVTENDIRVEESIYQCCDLAPEARQAIRSLTERLYIGGPLTNSKGQNCGYRRCRASGVLTTSCGNTLTCYLKAAAACRAAKLQDCTMLVCGDDLVVICESAGTQEDEASLRAFTEAMTRYSAPPGDPPKPEYDLELITSCSSNVSVAHDASGKRVYYLTRDPTTPLARAAWETARHTPVNSWLGNIIMYAPTIWARMILMTHFFSILLAQEQLEKTLDCQIYGACYSIEPLDLPQIIQRLHGLSAFSLHSYSPGEANRVTSCLRKLGIPPLRVWRHRARSVRARLLSQGGRAATCGKYLFNWAVRTKLKLTPIPAASQLDLSSWFVAGYSGGDIYHSLSRARPRWFMWCLLLLSVGVGIYLLPNR

SEQ ID NO: 232 - protein, 591 aa, Artificial Sequence
  Synthetic peptid
SMSYTWTGALITPCAAEETKLPINALSNSLLRHHNLVYATTSRSASLRQKKVTFDRLQVLDDHYRDVLKEMKAKASTVKAKLLSVEEACKLTPPHSARSKFGYGAKDVRNLSSKAVNHIRSVWKDLLEDTETPIDTTIMAKNEVFCVQPEKGGRKPARLIVFPDLGVRVCEKMALYDVVSTLPQAVMGSSYGFQYSPGQRVEFLVNAWKAKKCPMGFAYDTRCFDSTVTENDIRVEESIYQCCDLAPEARQAIRSLTERLYIGGPLTNSKGQNCGYRRCRASGVLTTSCGNTLTCYLKAAAACRAAKLQDCTMLVCGDDLVVICESAGTQEDEASLRAFTEAMTRYSAPPGDPPKPEYDLELITSCSSNVSVAHDASGKRVYYLTRDPTTPLARAAWETARHTPVNSWLGNIIMYAPTIWARMILMTHFFSILLAQEQLEKTLDCQIYGACYSIEPLDLPQIIQRLHGLSAFSLHSYSPGEANRVSSCLRKLGIPPLRVWRHRARSVRARLLSQGGRAATCGKYLFNWAVRTKLKLTPIPAASQLDLSSWFVAGYSGGDIYHSLSRARPRWFMWCLLLLSVGVGIYLLPNR

SEQ ID NO: 233 - protein, 591 aa, Artificial Sequence
  Synthetic peptide
SMSYTWTGALITPCAAEETKLPINALSNSLLRHHNLVYATTSRSASLRQKKVTFDRLQVLDDHYRDVLKEMKAKASTVKAKLLSVEEACKLTPPHSARSKFGYGAKDVRNLSSKAVNHIRSVWKDLLEDTETPIDTTIMAKNEVFCVQPEKGGRKPARLIVFPDLGVRVCEKMALYDVVSTLPQAVMGSSYGFQYSPGQRVEFLVNAWKAKKCPMGFAYDTRCFDSTVTENDIRVEESIYQCCDLAPEARQAIRSLTERLYIGGPLTNSKGQNCGYRRCRASGVLTTSCGNTLTCYLKAAAACRAAKLQDCTMLVCGDDLVVICESAGTQEDEASLRAFTEAMTRYSAPPGDPPKPEYDLELITSCSSNVSVAHDASGKRVYYLTRDPTTPLARAAWETARHTPVNSWLGNIIMYAPTIWARAILMTHFFSILLAQEQLEKTLDCQIYGACYSIEPLDLPQIIQRLHGLSAFSLHSYSPGEANRVASCLRKLGVPPLRVWRHRARSVRARLLSQGGRAATCGKYLFNWAVRTKLKLTPIPAASQLDLSSWFVAGYSGGDIYHSLSRARPRWFMWCLLLLSVGVGIYLLPNR

SEQ ID NO: 234 - protein, 591 aa, Artificial Sequence
  Synthetic peptide
SMSYTWTGALITPCAAEETKLPINALSNSLLRHHNLVYATTSRSASLRQKKVTFDRLQVLDDHYRDVLKEMKAKASTVKAKLLSVEEACKLTPPHSARSKFGYGAKDVRNLSSKAVNHIRSVWKDLLEDTETPIDTTIMAKNEVFCVQPEKGGRKPARLIVFPDLGVRVCEKMALYDVVSTLPQAVMGSSYGFQYSPGQRVEFLVNAWKAKKCPMGFAYDTRCFDSTVTENDIRVEESIYQCCDLAPEARQAIRSLTERLYIGGPLTNSKGQNCGYRRCRASGVLTTSCGNTLTCYLKAAAACRAAKLQDCTMLVCGDDLVVICESAGTQEDEASLRAFTEAMTRYSAPPGDPPKPEYDLELITSCSSNVSVAHDASGKRVYYLTRDPTTPLARAAWETARHTPVNSWLGNIIMYAPTIWARAILMTHFFSILLAQEQLEKTLDCQIYGACYSIEPLDLPQIIQRLHGLSAFSLHSYSPGEANRVVSCLRKLGVPPLRVWRHRARSVRARLLSQGGRAATCGKYLFNWAVRTKLKLTPIPAASQLDLSSWFVAGYSGGDIYHSLSRARPRWFMWCLLLLSVGVGIYLLPNR

SEQ ID NO: 235 - protein, 591 aa, Artificial Sequence
  Synthetic peptide
SMSYTWTGALITPCAAEETKLPINALSNSLLRHHNLVYATTSRSASLRQKKVTFDRLQVLDDHYRDVLKEMKAKASTVKAKLLSVEEACKLTPPHSARSKFGYGAKDVRNLSSKAVNHIRSVWKDLLEDTETPIDTTIMAKNEVFCVQPEKGGRKPARLIVFPDLGVRVCEKMALYDVVSTLPQAVMGSSYGFQYSPGQRVEFLVNAWKAKKCPMGFAYDTRCFDSTVTENDIRVEESIYQCCDLAPEARQAIRSLTERLYIGGPLTNSKGQNCGYRRCRASGVLTTSCGNTLTCYLKAAAACRAAKLQDCTMLVCGDDLVVICESAGTQEDEASLRAFTEAMTRYSAPPGDPPKPEYDLELITSCSSNVSVAHDASGKRVYYLTRDPTTPLARAAWETARHTPVNSWLGNIIMYAPTIWARAILMTHFFSILLAQEQLEKTLDCQIYGACYSIEPLDLPQIIQRLHGLSAFSLHSYSPGEANRVISCLRKLGVPPLRVWRHRARSVRARLLSQGGRAATCGKYLFNWAVRTKLKLTPIPAASQLDLSSWFVAGYSGGDIYHSLSRARPRWFMWCLLLLSVGVGIYLLPNR

SEQ ID NO: 236 - protein, 591 aa, Artificial Sequence
  Synthetic peptide
SMSYTWTGALITPCAAEETKLPINALSNSLLRHHNLVYATTSRSASLRQKKVTFDRLQVLDDHYRDVLKEMKAKASTVKAKLLSVEEACKLTPPHSARSKFGYGAKDVRNLSSKAVNHIRSVWKDLLEDTETPIDTTIMAKNEVFCVQPEKGGRKPARLIVFPDLGVRVCEKMALYDVVSTLPQAVMGSSYGFQYSPGQRVEFLVNAWKAKKCPMGFAYDTRCFDSTVTENDIRVEESIYQCCDLAPEARQAIRSLTERLYIGGPLTNSKGQNCGYRRCRASGVLTTSCGNTLTCYLKAAAACRAAKLQDCTMLVCGDDLVVICESAGTQEDEASLRAFTEAMTRYSAPPGDPPKPEYDLELITSCSSNVSVAHDASGKRVYYLTRDPTTPLARAAWETARHTPVNSWLGNIIMYAPTIWARAILMTHFFSILLAQEQLEKTLDCQIYGACYSIEPLDLPQIIQRLHGLSAFSLHSYSPGEANRVTSCLRKLGVPPLRVWRHRARSVRARLLSQGGRAATCGKYLFNWAVRTKLKLTPIPAASQLDLSSWFVAGYSGGDIYHSLSRARPRWFMWCLLLLSVGVGIYLLPNR

SEQ ID NO: 237 - protein, 591 aa, Artificial Sequence
  Synthetic peptide
SMSYTWTGALITPCAAEETKLPINALSNSLLRHHNLVYATTSRSASLRQKKVTFDRLQVLDDHYRDVLKEMKAKASTVKAKLLSVEEACKLTPPHSARSKFGYGAKDVRNLSSKAVNHIRSVWKDLLEDTETPIDTTIMAKNEVFCVQPEKGGRKPARLIVFPDLGVRVCEKMALYDVVSTLPQAVMGSSYGFQYSPGQRVEFLVNAWKAKKCPMGFAYDTRCFDSTVTENDIRVEESIYQCCDLAPEARQAIRSLTERLYIGGPLTNSKGQNCGYRRCRASGVLTTSCGNTLTCYLKAAAACRAAKLQDCTMLVCGDDLVVICESAGTQEDEASLRAFTEAMTRYSAPPGDPPKPEYDLELITSCSSNVSVAHDASGKRVYYLTRDPTTPLARAAWETARHTPVNSWLGNIIMYAPTIWARAILMTHFFSILLAQEQLEKTLDCQIYGACYSIEPLDLPQIIQRLHGLSAFSLHSYSPGEANRVSSCLRKLGVPPLRVWRHRARSVRARLLSQGGRAATCGKYLFNWAVRTKLKLTPIPAASQLDLSSWFVAGYSGGDIYHSLSRARPRWFMWCLLLLSVGVGIYLLPNR

SEQ ID NO: 238 - protein, 591 aa, Artificial Sequence
  Synthetic peptide
SMSYTWTGALITPCAAEETKLPINALSNSLLRHHNLVYATTSRSASLRQKKVTFDRLQVLDDHYRDVLKEMKAKASTVKAKLLSVEEACKLTPPHSARSKFGYGAKDVRNLSSKAVNHIRSVWKDLLEDTETPIDTTIMAKNEVFCVQPEKGGRKPARLIVFPDLGVRVCEKMALYDVVSTLPQAVMGSSYGFQYSPGQRVEFLVNAWKAKKCPMGFAYDTRCFDSTVTENDIRVEESIYQCCDLAPEARQAIRSLTERLYIGGPLTNSKGQNCGYRRCRASGVLTTSCGNTLTCYLKAAAACRAAKLQDCTMLVCGDDLVVICESAGTQEDEASLRAFTEAMTRYSAPPGDPPKPEYDLELITSCSSNVSVAHDASGKRVYYLTRDPTTPLARAAWETARHTPVNSWLGNIIMYAPTIWARAILMTHFFSILLAQEQLEKTLDCQIYGACYSIEPLDLPQIIQRLHGLSAFSLHSYSPGEANRVASCLRKLGIPPLRVWRHRARSVRARLLSQGGRAATCGKYLFNWAVRTKLKLTPIPAASQLDLSSWFVAGYSGGDIYHSLSRARPRWFMWCLLLLSVGVGIYLLPNR

SEQ ID NO: 239 - protein, 591 aa, Artificial Sequence
  Synthetic peptide
SMSYTWTGALITPCAAEETKLPINALSNSLLRHHNLVYATTSRSASLRQKKVTFDRLQVLDDHYRDVLKEMKAKASTVKAKLLSVEEACKLTPPHSARSKFGYGAKDVRNLSSKAVNHIRSVWKDLLEDTETPIDTTIMAKNEVFCVQPEKGGRKPARLIVFPDLGVRVCEKMALYDVVSTLPQAVMGSSYGFQYSPGQRVEFLVNAWKAKKCPMGFAYDTRCFDSTVTENDIRVEESIYQCCDLAPEARQAIRSLTERLYIGGPLTNSKGQNCGYRRCRASGVLTTSCGNTLTCYLKAAAACRAAKLQDCTMLVCGDDLVVICESAGTQEDEASLRAFTEAMTRYSAPPGDPPKPEYDLELITSCSSNVSVAHDASGKRVYYLTRDPTTPLARAAWETARHTPVNSWLGNIIMYAPTIWARAILMTHFFSILLAQEQLEKTLDCQIYGACYSIEPLDLPQIIQRLHGLSAFSLHSYSPGEANRVVSCLRKLGIPPLRVWRHRARSVRARLLSQGGRAATCGKYLFNWAVRTKLKLTPIPAASQLDLSSWFVAGYSGGDIYHSLSRARPRWFMWCLLLLSVGVGIYLLPNR

SEQ ID NO: 240 - protein, 591 aa, Artificial Sequence
  Synthetic peptide
SMSYTWTGALITPCAAEETKLPINALSNSLLRHHNLVYATTSRSASLRQKKVTFDRLQVLDDHYRDVLKEMKAKASTVKAKLLSVEEACKLTPPHSARSKFGYGAKDVRNLSSKAVNHIRSVWKDLLEDTETPIDTTIMAKNEVFCVQPEKGGRKPARLIVFPDLGVRVCEKMALYDVVSTLPQAVMGSSYGFQYSPGQRVEFLVNAWKAKKCPMGFAYDTRCFDSTVTENDIRVEESIYQCCDLAPEARQAIRSLTERLYIGGPLTNSKGQNCGYRRCRASGVLTTSCGNTLTCYLKAAAACRAAKLQDCTMLVCGDDLVVICESAGTQEDEASLRAFTEAMTRYSAPPGDPPKPEYDLELITSCSSNVSVAHDASGKRVYYLTRDPTTPLARAAWETARHTPVNSWLGNIIMYAPTIWARAILMTHFFSILLAQEQLEKTLDCQIYGACYSIEPLDLPQIIQRLHGLSAFSLHSYSPGEANRVISCLRKLGIPPLRVWRHRARSVRARLLSQGGRAATCGKYLFNWAVRTKLKLTPIPAASQLDLSSWFVAGYSGGDIYHSLSRARPRWFMWCLLLLSVGVGIYLLPNR

SEQ ID NO: 241 - protein, 591 aa, Artificial Sequence
  Synthetic peptide
SMSYTWTGALITPCAAEETKLPINALSNSLLRHHNLVYATTSRSASLRQKKVTFDRLQVLDDHYRDVLKEMKAKASTVKAKLLSVEEACKLTPPHSARSKFGYGAKDVRNLSSKAVNHIRSVWKDLLEDTETPIDTTIMAKNEVFCVQPEKGGRKPARLIVFPDLGVRVCEKMALYDVVSTLPQAVMGSSYGFQYSPGQRVEFLVNAWKAKKCPMGFAYDTRCFDSTVTENDIRVEESIYQCCDLAPEARQAIRSLTERLYIGGPLTNSKGQNCGYRRCRASGVLTTSCGNTLTCYLKAAAACRAAKLQDCTMLVCGDDLVVICESAGTQEDEASLRAFTEAMTRYSAPPGDPPKPEYDLELITSCSSNVSVAHDASGKRVYYLTRDPTTPLARAAWETARHTPVNSWLGNIIMYAPTIWARAILMTHFFSILLAQEQLEKTLDCQIYGACYSIEPLDLPQIIQRLHGLSAFSLHSYSPGEANRVTSCLRKLGIPPLRVWRHRARSVRARLLSQGGRAATCGKYLFNWAVRTKLKLTPIPAASQLDLSSWFVAGYSGGDIYHSLSRARPRWFMWCLLLLSVGVGIYLLPNR

SEQ ID NO: 242 - protein, 591 aa, Artificial Sequence
  Synthetic peptide
SMSYTWTGALITPCAAEETKLPINALSNSLLRHHNLVYATTSRSASLRQKKVTFDRLQVLDDHYRDVLKEMKAKASTVKAKLLSVEEACKLTPPHSARSKFGYGAKDVRNLSSKAVNHIRSVWKDLLEDTETPIDTTIMAKNEVFCVQPEKGGRKPARLIVFPDLGVRVCEKMALYDVVSTLPQAVMGSSYGFQYSPGQRVEFLVNAWKAKKCPMGFAYDTRCFDSTVTENDIRVEESIYQCCDLAPEARQAIRSLTERLYIGGPLTNSKGQNCGYRRCRASGVLTTSCGNTLTCYLKAAAACRAAKLQDCTMLVCGDDLVVICESAGTQEDEASLRAFTEAMTRYSAPPGDPPKPEYDLELITSCSSNVSVAHDASGKRVYYLTRDPTTPLARAAWETARHTPVNSWLGNIIMYAPTIWARAILMTHFFSILLAQEQLEKTLDCQIYGACYSIEPLDLPQIIQRLHGLSAFSLHSYSPGEANRVSSCLRKLGIPPLRVWRHRARSVRARLLSQGGRAATCGKYLFNWAVRTKLKLTPIPAASQLDLSSWFVAGYSGGDIYHSLSRARPRWFMWCLLLLSVGVGIYLLPNR

SEQ ID NO: 243 - protein, 591 aa, Artificial Sequence
  Synthetic peptid
SMSYTWTGALITPCAAEETKLPINALSNSLLRHHNLVYATTSRSASLRQKKVTFDRLQVLDDHYRDVLKEMKAKASTVKAKLLSVEEACKLTPPHSARSKFGYGAKDVRNLSSKAVNHIRSVWKDLLEDTETPIDTTIMAKNEVFCVQPEKGGRKPARLIVFPDLGVRVCEKMALYDVVSTLPQAVMGSSYGFQYSPGQRVEFLVNAWKAKKCPMGFAYDTRCFDSTVTENDIRVEESIYQCCDLAPEARQAIRSLTERLYIGGPLTNSKGQNCGYRRCRASGVLTTSCGNTLTCYLKAAAACRAAKLQDCTMLVCGDDLVVICESAGTQEDEASLRAFTEAMTRYSAPPGDPPKPEYDLELITSCSSNVSVAHDASGKRVYYLTRDPTTPLARAAWETARHTPVNSWLGNIIMYAPTIWARMILMTHFFSILLAQEQLEKTLDCQIYGACYSIEPLDLPQIIQRLHGLSAFSLHSYSPGETNRVASCLRKLGVPPLRVWRHRARSVRARLLSQGGRAATCGKYLFNWAVRTKLKLTPIPAASQLDLSSWFVAGYSGGDIYHSLSRARPRWFMWCLLLLSVGVGIYLLPNR

SEQ ID NO: 244 - protein, 591 aa, Artificial Sequence
  Synthetic peptide
SMSYTWTGALITPCAAEETKLPINALSNSLLRHHNLVYATTSRSASLRQKKVTFDRLQVLDDHYRDVLKEMKAKASTVKAKLLSVEEACKLTPPHSARSKFGYGAKDVRNLSSKAVNHIRSVWKDLLEDTETPIDTTIMAKNEVFCVQPEKGGRKPARLIVFPDLGVRVCEKMALYDVVSTLPQAVMGSSYGFQYSPGQRVEFLVNAWKAKKCPMGFAYDTRCFDSTVTENDIRVEESIYQCCDLAPEARQAIRSLTERLYIGGPLTNSKGQNCGYRRCRASGVLTTSCGNTLTCYLKAAAACRAAKLQDCTMLVCGDDLVVICESAGTQEDEASLRAFTEAMTRYSAPPGDPPKPEYDLELITSCSSNVSVAHDASGKRVYYLTRDPTTPLARAAWETARHTPVNSWLGNIIMYAPTIWARMILMTHFFSILLAQEQLEKTLDCQIYGACYSIEPLDLPQIIQRLHGLSAFSLHSYSPGETNRVVSCLRKLGVPPLRVWRHRARSVRARLLSQGGRAATCGKYLFNWAVRTKLKLTPIPAASQLDLSSWFVAGYSGGDIYHSLSRARPRWFMWCLLLLSVGVGIYLLPNR

SEQ ID NO: 245 - protein, 591 aa, Artificial Sequence
  Synthetic peptide
SMSYTWTGALITPCAAEETKLPINALSNSLLRHHNLVYATTSRSASLRQKKVTFDRLQVLDDHYRDVLKEMKAKASTVKAKLLSVEEACKLTPPHSARSKFGYGAKDVRNLSSKAVNHIRSVWKDLLEDTETPIDTTIMAKNEVFCVQPEKGGRKPARLIVFPDLGVRVCEKMALYDVVSTLPQAVMGSSYGFQYSPGQRVEFLVNAWKAKKCPMGFAYDTRCFDSTVTENDIRVEESIYQCCDLAPEARQAIRSLTERLYIGGPLTNSKGQNCGYRRCRASGVLTTSCGNTLTCYLKAAAACRAAKLQDCTMLVCGDDLVVICESAGTQEDEASLRAFTEAMTRYSAPPGDPPKPEYDLELITSCSSNVSVAHDASGKRVYYLTRDPTTPLARAAWETARHTPVNSWLGNIIMYAPTIWARMILMTHFFSILLAQEQLEKTLDCQIYGACYSIEPLDLPQIIQRLHGLSAFSLHSYSPGETNRVISCLRKLGVPPLRVWRHRARSVRARLLSQGGRAATCGKYLFNWAVRTKLKLTPIPAASQLDLSSWFVAGYSGGDIYHSLSRARPRWFMWCLLLLSVGVGIYLLPNR

SEQ ID NO: 246 - protein, 591 aa, Artificial Sequence
  Synthetic peptide
SMSYTWTGALITPCAAEETKLPINALSNSLLRHHNLVYATTSRSASLRQKKVTFDRLQVLDDHYRDVLKEMKAKASTVKAKLLSVEEACKLTPPHSARSKFGYGAKDVRNLSSKAVNHIRSVWKDLLEDTETPIDTTIMAKNEVFCVQPEKGGRKPARLIVFPDLGVRVCEKMALYDVVSTLPQAVMGSSYGFQYSPGQRVEFLVNAWKAKKCPMGFAYDTRCFDSTVTENDIRVEESIYQCCDLAPEARQAIRSLTERLYIGGPLTNSKGQNCGYRRCRASGVLTTSCGNTLTCYLKAAAACRAAKLQDCTMLVCGDDLVVICESAGTQEDEASLRAFTEAMTRYSAPPGDPPKPEYDLELITSCSSNVSVAHDASGKRVYYLTRDPTTPLARAAWETARHTPVNSWLGNIIMYAPTIWARMILMTHFFSILLAQEQLEKTLDCQIYGACYSIEPLDLPQIIQRLHGLSAFSLHSYSPGETNRVTSCLRKLGVPPLRVWRHRARSVRARLLSQGGRAATCGKYLFNWAVRTKLKLTPIPAASQLDLSSWFVAGYSGGDIYHSLSRARPRWFMWCLLLLSVGVGIYLLPNR

SEQ ID NO: 247 - protein, 591 aa, Artificial Sequence
  Synthetic peptide
SMSYTWTGALITPCAAEETKLPINALSNSLLRHHNLVYATTSRSASLRQKKVTFDRLQVLDDHYRDVLKEMKAKASTVKAKLLSVEEACKLTPPHSARSKFGYGAKDVRNLSSKAVNHIRSVWKDLLEDTETPIDTTIMAKNEVFCVQPEKGGRKPARLIVFPDLGVRVCEKMALYDVVSTLPQAVMGSSYGFQYSPGQRVEFLVNAWKAKKCPMGFAYDTRCFDSTVTENDIRVEESIYQCCDLAPEARQAIRSLTERLYIGGPLTNSKGQNCGYRRCRASGVLTTSCGNTLTCYLKAAAACRAAKLQDCTMLVCGDDLVVICESAGTQEDEASLRAFTEAMTRYSAPPGDPPKPEYDLELITSCSSNVSVAHDASGKRVYYLTRDPTTPLARAAWETARHTPVNSWLGNIIMYAPTIWARMILMTHFFSILLAQEQLEKTLDCQIYGACYSIEPLDLPQIIQRLHGLSAFSLHSYSPGETNRVSSCLRKLGVPPLRVWRHRARSVRARLLSQGGRAATCGKYLFNWAVRTKLKLTPIPAASQLDLSSWFVAGYSGGDIYHSLSRARPRWFMWCLLLLSVGVGIYLLPNR

SEQ ID NO: 248 - protein, 591 aa, Artificial Sequence
  Synthetic peptide
SMSYTWTGALITPCAAEETKLPINALSNSLLRHHNLVYATTSRSASLRQKKVTFDRLQVLDDHYRDVLKEMKAKASTVKAKLLSVEEACKLTPPHSARSKFGYGAKDVRNLSSKAVNHIRSVWKDLLEDTETPIDTTIMAKNEVFCVQPEKGGRKPARLIVFPDLGVRVCEKMALYDVVSTLPQAVMGSSYGFQYSPGQRVEFLVNAWKAKKCPMGFAYDTRCFDSTVTENDIRVEESIYQCCDLAPEARQAIRSLTERLYIGGPLTNSKGQNCGYRRCRASGVLTTSCGNTLTCYLKAAAACRAAKLQDCTMLVCGDDLVVICESAGTQEDEASLRAFTEAMTRYSAPPGDPPKPEYDLELITSCSSNVSVAHDASGKRVYYLTRDPTTPLARAAWETARHTPVNSWLGNIIMYAPTIWARMILMTHFFSILLAQEQLEKTLDCQIYGACYSIEPLDLPQIIQRLHGLSAFSLHSYSPGETNRVASCLRKLGIPPLRVWRHRARSVRARLLSQGGRAATCGKYLFNWAVRTKLKLTPIPAASQLDLSSWFVAGYSGGDIYHSLSRARPRWFMWCLLLLSVGVGIYLLPNR

SEQ ID NO: 249 - protein, 591 aa, Artificial Sequence
  Synthetic peptide
SMSYTWTGALITPCAAEETKLPINALSNSLLRHHNLVYATTSRSASLRQKKVTFDRLQVLDDHYRDVLKEMKAKASTVKAKLLSVEEACKLTPPHSARSKFGYGAKDVRNLSSKAVNHIRSVWKDLLEDTETPIDTTIMAKNEVFCVQPEKGGRKPARLIVFPDLGVRVCEKMALYDVVSTLPQAVMGSSYGFQYSPGQRVEFLVNAWKAKKCPMGFAYDTRCFDSTVTENDIRVEESIYQCCDLAPEARQAIRSLTERLYIGGPLTNSKGQNCGYRRCRASGVLTTSCGNTLTCYLKAAAACRAAKLQDCTMLVCGDDLVVICESAGTQEDEASLRAFTEAMTRYSAPPGDPPKPEYDLELITSCSSNVSVAHDASGKRVYYLTRDPTTPLARAAWETARHTPVNSWLGNIIMYAPTIWARMILMTHFFSILLAQEQLEKTLDCQIYGACYSIEPLDLPQIIQRLHGLSAFSLHSYSPGETNRVVSCLRKLGIPPLRVWRHRARSVRARLLSQGGRAATCGKYLFNWAVRTKLKLTPIPAASQLDLSSWFVAGYSGGDIYHSLSRARPRWFMWCLLLLSVGVGIYLLPNR

SEQ ID NO: 250 - protein, 591 aa, Artificial Sequence
  Synthetic peptide
SMSYTWTGALITPCAAEETKLPINALSNSLLRHHNLVYATTSRSASLRQKKVTFDRLQVLDDHYRDVLKEMKAKASTVKAKLLSVEEACKLTPPHSARSKFGYGAKDVRNLSSKAVNHIRSVWKDLLEDTETPIDTTIMAKNEVFCVQPEKGGRKPARLIVFPDLGVRVCEKMALYDVVSTLPQAVMGSSYGFQYSPGQRVEFLVNAWKAKKCPMGFAYDTRCFDSTVTENDIRVEESIYQCCDLAPEARQAIRSLTERLYIGGPLTNSKGQNCGYRRCRASGVLTTSCGNTLTCYLKAAAACRAAKLQDCTMLVCGDDLVVICESAGTQEDEASLRAFTEAMTRYSAPPGDPPKPEYDLELITSCSSNVSVAHDASGKRVYYLTRDPTTPLARAAWETARHTPVNSWLGNIIMYAPTIWARMILMTHFFSILLAQEQLEKTLDCQIYGACYSIEPLDLPQIIQRLHGLSAFSLHSYSPGETNRVISCLRKLGIPPLRVWRHRARSVRARLLSQGGRAATCGKYLFNWAVRTKLKLTPIPAASQLDLSSWFVAGYSGGDIYHSLSRARPRWFMWCLLLLSVGVGIYLLPNR

SEQ ID NO: 251 - protein, 591 aa, Artificial Sequence
  Synthetic peptide
SMSYTWTGALITPCAAEETKLPINALSNSLLRHHNLVYATTSRSASLRQKKVTFDRLQVLDDHYRDVLKEMKAKASTVKAKLLSVEEACKLTPPHSARSKFGYGAKDVRNLSSKAVNHIRSVWKDLLEDTETPIDTTIMAKNEVFCVQPEKGGRKPARLIVFPDLGVRVCEKMALYDVVSTLPQAVMGSSYGFQYSPGQRVEFLVNAWKAKKCPMGFAYDTRCFDSTVTENDIRVEESIYQCCDLAPEARQAIRSLTERLYIGGPLTNSKGQNCGYRRCRASGVLTTSCGNTLTCYLKAAAACRAAKLQDCTMLVCGDDLVVICESAGTQEDEASLRAFTEAMTRYSAPPGDPPKPEYDLELITSCSSNVSVAHDASGKRVYYLTRDPTTPLARAAWETARHTPVNSWLGNIIMYAPTIWARMILMTHFFSILLAQEQLEKTLDCQIYGACYSIEPLDLPQIIQRLHGLSAFSLHSYSPGETNRVTSCLRKLGIPPLRVWRHRARSVRARLLSQGGRAATCGKYLFNWAVRTKLKLTPIPAASQLDLSSWFVAGYSGGDIYHSLSRARPRWFMWCLLLLSVGVGIYLLPNR

SEQ ID NO: 252 - protein, 591 aa, Artificial Sequence
  Synthetic peptide
SMSYTWTGALITPCAAEETKLPINALSNSLLRHHNLVYATTSRSASLRQKKVTFDRLQVLDDHYRDVLKEMKAKASTVKAKLLSVEEACKLTPPHSARSKFGYGAKDVRNLSSKAVNHIRSVWKDLLEDTETPIDTTIMAKNEVFCVQPEKGGRKPARLIVFPDLGVRVCEKMALYDVVSTLPQAVMGSSYGFQYSPGQRVEFLVNAWKAKKCPMGFAYDTRCFDSTVTENDIRVEESIYQCCDLAPEARQAIRSLTERLYIGGPLTNSKGQNCGYRRCRASGVLTTSCGNTLTCYLKAAAACRAAKLQDCTMLVCGDDLVVICESAGTQEDEASLRAFTEAMTRYSAPPGDPPKPEYDLELITSCSSNVSVAHDASGKRVYYLTRDPTTPLARAAWETARHTPVNSWLGNIIMYAPTIWARMILMTHFFSILLAQEQLEKTLDCQIYGACYSIEPLDLPQIIQRLHGLSAFSLHSYSPGETNRVSSCLRKLGIPPLRVWRHRARSVRARLLSQGGRAATCGKYLFNWAVRTKLKLTPIPAASQLDLSSWFVAGYSGGDIYHSLSRARPRWFMWCLLLLSVGVGIYLLPNR

SEQ ID NO: 253 - protein, 591 aa, Artificial Sequence
  Synthetic peptide
SMSYTWTGALITPCAAEETKLPINALSNSLLRHHNLVYATTSRSASLRQKKVTFDRLQVLDDHYRDVLKEMKAKASTVKAKLLSVEEACKLTPPHSARSKFGYGAKDVRNLSSKAVNHIRSVWKDLLEDTETPIDTTIMAKNEVFCVQPEKGGRKPARLIVFPDLGVRVCEKMALYDVVSTLPQAVMGSSYGFQYSPGQRVEFLVNAWKAKKCPMGFAYDTRCFDSTVTENDIRVEESIYQCCDLAPEARQAIRSLTERLYIGGPLTNSKGQNCGYRRCRASGVLTTSCGNTLTCYLKAAAACRAAKLQDCTMLVCGDDLVVICESAGTQEDEASLRAFTEAMTRYSAPPGDPPKPEYDLELITSCSSNVSVAHDASGKRVYYLTRDPTTPLARAAWETARHTPVNSWLGNIIMYAPTIWARAILMTHFFSILLAQEQLEKTLDCQIYGACYSIEPLDLPQIIQRLHGLSAFSLHSYSPGETNRVASCLRKLGVPPLRVWRHRARSVRARLLSQGGRAATCGKYLFNWAVRTKLKLTPIPAASQLDLSSWFVAGYSGGDIYHSLSRARPRWFMWCLLLLSVGVGIYLLPNR

SEQ ID NO: 254 - protein, 591 aa, Artificial Sequence
  Synthetic peptide
SMSYTWTGALITPCAAEETKLPINALSNSLLRHHNLVYATTSRSASLRQKKVTFDRLQVLDDHYRDVLKEMKAKASTVKAKLLSVEEACKLTPPHSARSKFGYGAKDVRNLSSKAVNHIRSVWKDLLEDTETPIDTTIMAKNEVFCVQPEKGGRKPARLIVFPDLGVRVCEKMALYDVVSTLPQAVMGSSYGFQYSPGQRVEFLVNAWKAKKCPMGFAYDTRCFDSTVTENDIRVEESIYQCCDLAPEARQAIRSLTERLYIGGPLTNSKGQNCGYRRCRASGVLTTSCGNTLTCYLKAAAACRAAKLQDCTMLVCGDDLVVICESAGTQEDEASLRAFTEAMTRYSAPPGDPPKPEYDLELITSCSSNVSVAHDASGKRVYYLTRDPTTPLARAAWETARHTPVNSWLGNIIMYAPTIWARAILMTHFFSILLAQEQLEKTLDCQIYGACYSIEPLDLPQIIQRLHGLSAFSLHSYSPGETNRVVSCLRKLGVPPLRVWRHRARSVRARLLSQGGRAATCGKYLFNWAVRTKLKLTPIPAASQLDLSSWFVAGYSGGDIYHSLSRARPRWFMWCLLLLSVGVGIYLLPNR

SEQ ID NO: 255 - protein, 591 aa, Artificial Sequence
  Synthetic peptide
SMSYTWTGALITPCAAEETKLPINALSNSLLRHHNLVYATTSRSASLRQKKVTFDRLQVLDDHYRDVLKEMKAKASTVKAKLLSVEEACKLTPPHSARSKFGYGAKDVRNLSSKAVNHIRSVWKDLLEDTETPIDTTIMAKNEVFCVQPEKGGRKPARLIVFPDLGVRVCEKMALYDVVSTLPQAVMGSSYGFQYSPGQRVEFLVNAWKAKKCPMGFAYDTRCFDSTVTENDIRVEESIYQCCDLAPEARQAIRSLTERLYIGGPLTNSKGQNCGYRRCRASGVLTTSCGNTLTCYLKAAAACRAAKLQDCTMLVCGDDLVVICESAGTQEDEASLRAFTEAMTRYSAPPGDPPKPEYDLELITSCSSNVSVAHDASGKRVYYLTRDPTTPLARAAWETARHTPVNSWLGNIIMYAPTIWARAILMTHFFSILLAQEQLEKTLDCQIYGACYSIEPLDLPQIIQRLHGLSAFSLHSYSPGETNRVISCLRKLGVPPLRVWRHRARSVRARLLSQGGRAATCGKYLFNWAVRTKLKLTPIPAASQLDLSSWFVAGYSGGDIYHSLSRARPRWFMWCLLLLSVGVGIYLLPNR

SEQ ID NO: 256 - protein, 591 aa, Artificial Sequence
  Synthetic peptide
SMSYTWTGALITPCAAEETKLPINALSNSLLRHHNLVYATTSRSASLRQKKVTFDRLQVLDDHYRDVLKEMKAKASTVKAKLLSVEEACKLTPPHSARSKFGYGAKDVRNLSSKAVNHIRSVWKDLLEDTETPIDTTIMAKNEVFCVQPEKGGRKPARLIVFPDLGVRVCEKMALYDVVSTLPQAVMGSSYGFQYSPGQRVEFLVNAWKAKKCPMGFAYDTRCFDSTVTENDIRVEESIYQCCDLAPEARQAIRSLTERLYIGGPLTNSKGQNCGYRRCRASGVLTTSCGNTLTCYLKAAAACRAAKLQDCTMLVCGDDLVVICESAGTQEDEASLRAFTEAMTRYSAPPGDPPKPEYDLELITSCSSNVSVAHDASGKRVYYLTRDPTTPLARAAWETARHTPVNSWLGNIIMYAPTIWARAILMTHFFSILLAQEQLEKTLDCQIYGACYSIEPLDLPQIIQRLHGLSAFSLHSYSPGETNRVTSCLRKLGVPPLRVWRHRARSVRARLLSQGGRAATCGKYLFNWAVRTKLKLTPIPAASQLDLSSWFVAGYSGGDIYHSLSRARPRWFMWCLLLLSVGVGIYLLPNR

SEQ ID NO: 257 - protein, 591 aa, Artificial Sequence
  Synthetic peptide
SMSYTWTGALITPCAAEETKLPINALSNSLLRHHNLVYATTSRSASLRQKKVTFDRLQVLDDHYRDVLKEMKAKASTVKAKLLSVEEACKLTPPHSARSKFGYGAKDVRNLSSKAVNHIRSVWKDLLEDTETPIDTTIMAKNEVFCVQPEKGGRKPARLIVFPDLGVRVCEKMALYDVVSTLPQAVMGSSYGFQYSPGQRVEFLVNAWKAKKCPMGFAYDTRCFDSTVTENDIRVEESIYQCCDLAPEARQAIRSLTERLYIGGPLTNSKGQNCGYRRCRASGVLTTSCGNTLTCYLKAAAACRAAKLQDCTMLVCGDDLVVICESAGTQEDEASLRAFTEAMTRYSAPPGDPPKPEYDLELITSCSSNVSVAHDASGKRVYYLTRDPTTPLARAAWETARHTPVNSWLGNIIMYAPTIWARAILMTHFFSILLAQEQLEKTLDCQIYGACYSIEPLDLPQIIQRLHGLSAFSLHSYSPGETNRVSSCLRKLGVPPLRVWRHRARSVRARLLSQGGRAATCGKYLFNWAVRTKLKLTPIPAASQLDLSSWFVAGYSGGDIYHSLSRARPRWFMWCLLLLSVGVGIYLLPNR

SEQ ID NO: 258 - protein, 591 aa, Artificial Sequence
  Synthetic peptide
SMSYTWTGALITPCAAEETKLPINALSNSLLRHHNLVYATTSRSASLRQKKVTFDRLQVLDDHYRDVLKEMKAKASTVKAKLLSVEEACKLTPPHSARSKFGYGAKDVRNLSSKAVNHIRSVWKDLLEDTETPIDTTIMAKNEVFCVQPEKGGRKPARLIVFPDLGVRVCEKMALYDVVSTLPQAVMGSSYGFQYSPGQRVEFLVNAWKAKKCPMGFAYDTRCFDSTVTENDIRVEESIYQCCDLAPEARQAIRSLTERLYIGGPLTNSKGQNCGYRRCRASGVLTTSCGNTLTCYLKAAAACRAAKLQDCTMLVCGDDLVVICESAGTQEDEASLRAFTEAMTRYSAPPGDPPKPEYDLELITSCSSNVSVAHDASGKRVYYLTRDPTTPLARAAWETARHTPVNSWLGNIIMYAPTIWARAILMTHFFSILLAQEQLEKTLDCQIYGACYSIEPLDLPQIIQRLHGLSAFSLHSYSPGETNRVASCLRKLGIPPLRVWRHRARSVRARLLSQGGRAATCGKYLFNWAVRTKLKLTPIPAASQLDLSSWFVAGYSGGDIYHSLSRARPRWFMWCLLLLSVGVGIYLLPNR

SEQ ID NO: 259 - protein, 591 aa, Artificial Sequence
  Synthetic peptide
SMSYTWTGALITPCAAEETKLPINALSNSLLRHHNLVYATTSRSASLRQKKVTFDRLQVLDDHYRDVLKEMKAKASTVKAKLLSVEEACKLTPPHSARSKFGYGAKDVRNLSSKAVNHIRSVWKDLLEDTETPIDTTIMAKNEVFCVQPEKGGRKPARLIVFPDLGVRVCEKMALYDVVSTLPQAVMGSSYGFQYSPGQRVEFLVNAWKAKKCPMGFAYDTRCFDSTVTENDIRVEESIYQCCDLAPEARQAIRSLTERLYIGGPLTNSKGQNCGYRRCRASGVLTTSCGNTLTCYLKAAAACRAAKLQDCTMLVCGDDLVVICESAGTQEDEASLRAFTEAMTRYSAPPGDPPKPEYDLELITSCSSNVSVAHDASGKRVYYLTRDPTTPLARAAWETARHTPVNSWLGNIIMYAPTIWARAILMTHFFSILLAQEQLEKTLDCQIYGACYSIEPLDLPQIIQRLHGLSAFSLHSYSPGETNRVVSCLRKLGIPPLRVWRHRARSVRARLLSQGGRAATCGKYLFNWAVRTKLKLTPIPAASQLDLSSWFVAGYSGGDIYHSLSRARPRWFMWCLLLLSVGVGIYLLPNR

SEQ ID NO: 260 - protein, 591 aa, Artificial Sequence
  Synthetic peptid
SMSYTWTGALITPCAAEETKLPINALSNSLLRHHNLVYATTSRSASLRQKKVTFDRLQVLDDHYRDVLKEMKAKASTVKAKLLSVEEACKLTPPHSARSKFGYGAKDVRNLSSKAVNHIRSVWKDLLEDTETPIDTTIMAKNEVFCVQPEKGGRKPARLIVFPDLGVRVCEKMALYDVVSTLPQAVMGSSYGFQYSPGQRVEFLVNAWKAKKCPMGFAYDTRCFDSTVTENDIRVEESIYQCCDLAPEARQAIRSLTERLYIGGPLTNSKGQNCGYRRCRASGVLTTSCGNTLTCYLKAAAACRAAKLQDCTMLVCGDDLVVICESAGTQEDEASLRAFTEAMTRYSAPPGDPPKPEYDLELITSCSSNVSVAHDASGKRVYYLTRDPTTPLARAAWETARHTPVNSWLGNIIMYAPTIWARAILMTHFFSILLAQEQLEKTLDCQIYGACYSIEPLDLPQIIQRLHGLSAFSLHSYSPGETNRVISCLRKLGIPPLRVWRHRARSVRARLLSQGGRAATCGKYLFNWAVRTKLKLTPIPAASQLDLSSWFVAGYSGGDIYHSLSRARPRWFMWCLLLLSVGVGIYLLPNR

SEQ ID NO: 261 - protein, 591 aa, Artificial Sequence
  Synthetic peptide
SMSYTWTGALITPCAAEETKLPINALSNSLLRHHNLVYATTSRSASLRQKKVTFDRLQVLDDHYRDVLKEMKAKASTVKAKLLSVEEACKLTPPHSARSKFGYGAKDVRNLSSKAVNHIRSVWKDLLEDTETPIDTTIMAKNEVFCVQPEKGGRKPARLIVFPDLGVRVCEKMALYDVVSTLPQAVMGSSYGFQYSPGQRVEFLVNAWKAKKCPMGFAYDTRCFDSTVTENDIRVEESIYQCCDLAPEARQAIRSLTERLYIGGPLTNSKGQNCGYRRCRASGVLTTSCGNTLTCYLKAAAACRAAKLQDCTMLVCGDDLVVICESAGTQEDEASLRAFTEAMTRYSAPPGDPPKPEYDLELITSCSSNVSVAHDASGKRVYYLTRDPTTPLARAAWETARHTPVNSWLGNIIMYAPTIWARAILMTHFFSILLAQEQLEKTLDCQIYGACYSIEPLDLPQIIQRLHGLSAFSLHSYSPGETNRVTSCLRKLGIPPLRVWRHRARSVRARLLSQGGRAATCGKYLFNWAVRTKLKLTPIPAASQLDLSSWFVAGYSGGDIYHSLSRARPRWFMWCLLLLSVGVGIYLLPNR

SEQ ID NO: 262 - protein, 591 aa, Artificial Sequence
  Synthetic peptide
SMSYTWTGALITPCAAEETKLPINALSNSLLRHHNLVYATTSRSASLRQKKVTFDRLQVLDDHYRDVLKEMKAKASTVKAKLLSVEEACKLTPPHSARSKFGYGAKDVRNLSSKAVNHIRSVWKDLLEDTETPIDTTIMAKNEVFCVQPEKGGRKPARLIVFPDLGVRVCEKMALYDVVSTLPQAVMGSSYGFQYSPGQRVEFLVNAWKAKKCPMGFAYDTRCFDSTVTENDIRVEESIYQCCDLAPEARQAIRSLTERLYIGGPLTNSKGQNCGYRRCRASGVLTTSCGNTLTCYLKAAAACRAAKLQDCTMLVCGDDLVVICESAGTQEDEASLRAFTEAMTRYSAPPGDPPKPEYDLELITSCSSNVSVAHDASGKRVYYLTRDPTTPLARAAWETARHTPVNSWLGNIIMYAPTIWARAILMTHFFSILLAQEQLEKTLDCQIYGACYSIEPLDLPQIIQRLHGLSAFSLHSYSPGETNRVSSCLRKLGIPPLRVWRHRARSVRARLLSQGGRAATCGKYLFNWAVRTKLKLTPIPAASQLDLSSWFVAGYSGGDIYHSLSRARPRWFMWCLLLLSVGVGIYLLPNR

SEQ ID NO: 263 - protein, 591 aa, Artificial Sequence
  Synthetic peptide
SMSYTWTGALITPCAAEETKLPINALSNSLLRHHNLVYATTSRSASLRQKKVTFDRLQVLDDHYRDVLKEMKAKASTVKAKLLSVEEACKLTPPHSARSKFGYGAKDVRNLSSKAVNHIRSVWKDLLEDTETPIDTTIMAKNEVFCVQPEKGGRKPARLIVFPDLGVRVCEKMALYDVVSTLPQAVMGSSYGFQYSPGQRVEFLVNAWKAKKCPMGFAYDTRCFDSTVTENDIRVEESIYQCCDLAPEARQAIRSLTERLYIGGPLTNSKGQNCGYRRCRASGVLTTSCGNTLTCYLKAAAACRAAKLQDCTMLVCGDDLVVICESAGTQEDEASLRAFTEAMTRYSAPPGDPPKPEYDLELITSCSSNVSVAHDASGKRVYYLTRDPTTPLARAAWETARHTPVNSWLGNIIMYAPTIWARMILMTHFFSILLAQEQLEKTLDCQIYGACYSIEPLDLPQIIQRLHGLSAFSLHSYSPGEVNRVASCLRKLGVPPLRVWRHRARSVRARLLSQGGRAATCGKYLFNWAVRTKLKLTPIPAASQLDLSSWFVAGYSGGDIYHSLSRARPRWFMWCLLLLSVGVGIYLLPNR

SEQ ID NO: 264 - protein, 591 aa, Artificial Sequence
  Synthetic peptide
SMSYTWTGALITPCAAEETKLPINALSNSLLRHHNLVYATTSRSASLRQKKVTFDRLQVLDDHYRDVLKEMKAKASTVKAKLLSVEEACKLTPPHSARSKFGYGAKDVRNLSSKAVNHIRSVWKDLLEDTETPIDTTIMAKNEVFCVQPEKGGRKPARLIVFPDLGVRVCEKMALYDVVSTLPQAVMGSSYGFQYSPGQRVEFLVNAWKAKKCPMGFAYDTRCFDSTVTENDIRVEESIYQCCDLAPEARQAIRSLTERLYIGGPLTNSKGQNCGYRRCRASGVLTTSCGNTLTCYLKAAAACRAAKLQDCTMLVCGDDLVVICESAGTQEDEASLRAFTEAMTRYSAPPGDPPKPEYDLELITSCSSNVSVAHDASGKRVYYLTRDPTTPLARAAWETARHTPVNSWLGNIIMYAPTIWARMILMTHFFSILLAQEQLEKTLDCQIYGACYSIEPLDLPQIIQRLHGLSAFSLHSYSPGEVNRVVSCLRKLGVPPLRVWRHRARSVRARLLSQGGRAATCGKYLFNWAVRTKLKLTPIPAASQLDLSSWFVAGYSGGDIYHSLSRARPRWFMWCLLLLSVGVGIYLLPNR

SEQ ID NO: 265 - protein, 591 aa, Artificial Sequence
  Synthetic peptide
SMSYTWTGALITPCAAEETKLPINALSNSLLRHHNLVYATTSRSASLRQKKVTFDRLQVLDDHYRDVLKEMKAKASTVKAKLLSVEEACKLTPPHSARSKFGYGAKDVRNLSSKAVNHIRSVWKDLLEDTETPIDTTIMAKNEVFCVQPEKGGRKPARLIVFPDLGVRVCEKMALYDVVSTLPQAVMGSSYGFQYSPGQRVEFLVNAWKAKKCPMGFAYDTRCFDSTVTENDIRVEESIYQCCDLAPEARQAIRSLTERLYIGGPLTNSKGQNCGYRRCRASGVLTTSCGNTLTCYLKAAAACRAAKLQDCTMLVCGDDLVVICESAGTQEDEASLRAFTEAMTRYSAPPGDPPKPEYDLELITSCSSNVSVAHDASGKRVYYLTRDPTTPLARAAWETARHTPVNSWLGNIIMYAPTIWARMILMTHFFSILLAQEQLEKTLDCQIYGACYSIEPLDLPQIIQRLHGLSAFSLHSYSPGEVNRVISCLRKLGVPPLRVWRHRARSVRARLLSQGGRAATCGKYLFNWAVRTKLKLTPIPAASQLDLSSWFVAGYSGGDIYHSLSRARPRWFMWCLLLLSVGVGIYLLPNR

SEQ ID NO: 266 - protein, 591 aa, Artificial Sequence
  Synthetic peptide
SMSYTWTGALITPCAAEETKLPINALSNSLLRHHNLVYATTSRSASLRQKKVTFDRLQVLDDHYRDVLKEMKAKASTVKAKLLSVEEACKLTPPHSARSKFGYGAKDVRNLSSKAVNHIRSVWKDLLEDTETPIDTTIMAKNEVFCVQPEKGGRKPARLIVFPDLGVRVCEKMALYDVVSTLPQAVMGSSYGFQYSPGQRVEFLVNAWKAKKCPMGFAYDTRCFDSTVTENDIRVEESIYQCCDLAPEARQAIRSLTERLYIGGPLTNSKGQNCGYRRCRASGVLTTSCGNTLTCYLKAAAACRAAKLQDCTMLVCGDDLVVICESAGTQEDEASLRAFTEAMTRYSAPPGDPPKPEYDLELITSCSSNVSVAHDASGKRVYYLTRDPTTPLARAAWETARHTPVNSWLGNIIMYAPTIWARMILMTHFFSILLAQEQLEKTLDCQIYGACYSIEPLDLPQIIQRLHGLSAFSLHSYSPGEVNRVTSCLRKLGVPPLRVWRHRARSVRARLLSQGGRAATCGKYLFNWAVRTKLKLTPIPAASQLDLSSWFVAGYSGGDIYHSLSRARPRWFMWCLLLLSVGVGIYLLPNR

SEQ ID NO: 267 - protein, 591 aa, Artificial Sequence
  Synthetic peptide
SMSYTWTGALITPCAAEETKLPINALSNSLLRHHNLVYATTSRSASLRQKKVTFDRLQVLDDHYRDVLKEMKAKASTVKAKLLSVEEACKLTPPHSARSKFGYGAKDVRNLSSKAVNHIRSVWKDLLEDTETPIDTTIMAKNEVFCVQPEKGGRKPARLIVFPDLGVRVCEKMALYDVVSTLPQAVMGSSYGFQYSPGQRVEFLVNAWKAKKCPMGFAYDTRCFDSTVTENDIRVEESIYQCCDLAPEARQAIRSLTERLYIGGPLTNSKGQNCGYRRCRASGVLTTSCGNTLTCYLKAAAACRAAKLQDCTMLVCGDDLVVICESAGTQEDEASLRAFTEAMTRYSAPPGDPPKPEYDLELITSCSSNVSVAHDASGKRVYYLTRDPTTPLARAAWETARHTPVNSWLGNIIMYAPTIWARMILMTHFFSILLAQEQLEKTLDCQIYGACYSIEPLDLPQIIQRLHGLSAFSLHSYSPGEVNRVSSCLRKLGVPPLRVWRHRARSVRARLLSQGGRAATCGKYLFNWAVRTKLKLTPIPAASQLDLSSWFVAGYSGGDIYHSLSRARPRWFMWCLLLLSVGVGIYLLPNR

SEQ ID NO: 268 - protein, 591 aa, Artificial Sequence
  Synthetic peptide
SMSYTWTGALITPCAAEETKLPINALSNSLLRHHNLVYATTSRSASLRQKKVTFDRLQVLDDHYRDVLKEMKAKASTVKAKLLSVEEACKLTPPHSARSKFGYGAKDVRNLSSKAVNHIRSVWKDLLEDTETPIDTTIMAKNEVFCVQPEKGGRKPARLIVFPDLGVRVCEKMALYDVVSTLPQAVMGSSYGFQYSPGQRVEFLVNAWKAKKCPMGFAYDTRCFDSTVTENDIRVEESIYQCCDLAPEARQAIRSLTERLYIGGPLTNSKGQNCGYRRCRASGVLTTSCGNTLTCYLKAAAACRAAKLQDCTMLVCGDDLVVICESAGTQEDEASLRAFTEAMTRYSAPPGDPPKPEYDLELITSCSSNVSVAHDASGKRVYYLTRDPTTPLARAAWETARHTPVNSWLGNIIMYAPTIWARMILMTHFFSILLAQEQLEKTLDCQIYGACYSIEPLDLPQIIQRLHGLSAFSLHSYSPGEVNRVASCLRKLGIPPLRVWRHRARSVRARLLSQGGRAATCGKYLFNWAVRTKLKLTPIPAASQLDLSSWFVAGYSGGDIYHSLSRARPRWFMWCLLLLSVGVGIYLLPNR

SEQ ID NO: 269 - protein, 591 aa, Artificial Sequence
  Synthetic peptide
SMSYTWTGALITPCAAEETKLPINALSNSLLRHHNLVYATTSRSASLRQKKVTFDRLQVLDDHYRDVLKEMKAKASTVKAKLLSVEEACKLTPPHSARSKFGYGAKDVRNLSSKAVNHIRSVWKDLLEDTETPIDTTIMAKNEVFCVQPEKGGRKPARLIVFPDLGVRVCEKMALYDVVSTLPQAVMGSSYGFQYSPGQRVEFLVNAWKAKKCPMGFAYDTRCFDSTVTENDIRVEESIYQCCDLAPEARQAIRSLTERLYIGGPLTNSKGQNCGYRRCRASGVLTTSCGNTLTCYLKAAAACRAAKLQDCTMLVCGDDLVVICESAGTQEDEASLRAFTEAMTRYSAPPGDPPKPEYDLELITSCSSNVSVAHDASGKRVYYLTRDPTTPLARAAWETARHTPVNSWLGNIIMYAPTIWARMILMTHFFSILLAQEQLEKTLDCQIYGACYSIEPLDLPQIIQRLHGLSAFSLHSYSPGEVNRVVSCLRKLGIPPLRVWRHRARSVRARLLSQGGRAATCGKYLFNWAVRTKLKLTPIPAASQLDLSSWFVAGYSGGDIYHSLSRARPRWFMWCLLLLSVGVGIYLLPNR

SEQ ID NO: 270 - protein, 591 aa, Artificial Sequence
  Synthetic peptide
SMSYTWTGALITPCAAEETKLPINALSNSLLRHHNLVYATTSRSASLRQKKVTFDRLQVLDDHYRDVLKEMKAKASTVKAKLLSVEEACKLTPPHSARSKFGYGAKDVRNLSSKAVNHIRSVWKDLLEDTETPIDTTIMAKNEVFCVQPEKGGRKPARLIVFPDLGVRVCEKMALYDVVSTLPQAVMGSSYGFQYSPGQRVEFLVNAWKAKKCPMGFAYDTRCFDSTVTENDIRVEESIYQCCDLAPEARQAIRSLTERLYIGGPLTNSKGQNCGYRRCRASGVLTTSCGNTLTCYLKAAAACRAAKLQDCTMLVCGDDLVVICESAGTQEDEASLRAFTEAMTRYSAPPGDPPKPEYDLELITSCSSNVSVAHDASGKRVYYLTRDPTTPLARAAWETARHTPVNSWLGNIIMYAPTIWARMILMTHFFSILLAQEQLEKTLDCQIYGACYSIEPLDLPQIIQRLHGLSAFSLHSYSPGEVNRVISCLRKLGIPPLRVWRHRARSVRARLLSQGGRAATCGKYLFNWAVRTKLKLTPIPAASQLDLSSWFVAGYSGGDIYHSLSRARPRWFMWCLLLLSVGVGIYLLPNR

SEQ ID NO: 271 - protein, 591 aa, Artificial Sequence
  Synthetic peptid
SMSYTWTGALITPCAAEETKLPINALSNSLLRHHNLVYATTSRSASLRQKKVTFDRLQVLDDHYRDVLKEMKAKASTVKAKLLSVEEACKLTPPHSARSKFGYGAKDVRNLSSKAVNHIRSVWKDLLEDTETPIDTTIMAKNEVFCVQPEKGGRKPARLIVFPDLGVRVCEKMALYDVVSTLPQAVMGSSYGFQYSPGQRVEFLVNAWKAKKCPMGFAYDTRCFDSTVTENDIRVEESIYQCCDLAPEARQAIRSLTERLYIGGPLTNSKGQNCGYRRCRASGVLTTSCGNTLTCYLKAAAACRAAKLQDCTMLVCGDDLVVICESAGTQEDEASLRAFTEAMTRYSAPPGDPPKPEYDLELITSCSSNVSVAHDASGKRVYYLTRDPTTPLARAAWETARHTPVNSWLGNIIMYAPTIWARMILMTHFFSILLAQEQLEKTLDCQIYGACYSIEPLDLPQIIQRLHGLSAFSLHSYSPGEVNRVTSCLRKLGIPPLRVWRHRARSVRARLLSQGGRAATCGKYLFNWAVRTKLKLTPIPAASQLDLSSWFVAGYSGGDIYHSLSRARPRWFMWCLLLLSVGVGIYLLPNR

SEQ ID NO: 272 - protein, 591 aa, Artificial Sequence
  Synthetic peptide
SMSYTWTGALITPCAAEETKLPINALSNSLLRHHNLVYATTSRSASLRQKKVTFDRLQVLDDHYRDVLKEMKAKASTVKAKLLSVEEACKLTPPHSARSKFGYGAKDVRNLSSKAVNHIRSVWKDLLEDTETPIDTTIMAKNEVFCVQPEKGGRKPARLIVFPDLGVRVCEKMALYDVVSTLPQAVMGSSYGFQYSPGQRVEFLVNAWKAKKCPMGFAYDTRCFDSTVTENDIRVEESIYQCCDLAPEARQAIRSLTERLYIGGPLTNSKGQNCGYRRCRASGVLTTSCGNTLTCYLKAAAACRAAKLQDCTMLVCGDDLVVICESAGTQEDEASLRAFTEAMTRYSAPPGDPPKPEYDLELITSCSSNVSVAHDASGKRVYYLTRDPTTPLARAAWETARHTPVNSWLGNIIMYAPTIWARMILMTHFFSILLAQEQLEKTLDCQIYGACYSIEPLDLPQIIQRLHGLSAFSLHSYSPGEVNRVSSCLRKLGIPPLRVWRHRARSVRARLLSQGGRAATCGKYLFNWAVRTKLKLTPIPAASQLDLSSWFVAGYSGGDIYHSLSRARPRWFMWCLLLLSVGVGIYLLPNR

SEQ ID NO: 273 - protein, 591 aa, Artificial Sequence
  Synthetic peptide
SMSYTWTGALITPCAAEETKLPINALSNSLLRHHNLVYATTSRSASLRQKKVTFDRLQVLDDHYRDVLKEMKAKASTVKAKLLSVEEACKLTPPHSARSKFGYGAKDVRNLSSKAVNHIRSVWKDLLEDTETPIDTTIMAKNEVFCVQPEKGGRKPARLIVFPDLGVRVCEKMALYDVVSTLPQAVMGSSYGFQYSPGQRVEFLVNAWKAKKCPMGFAYDTRCFDSTVTENDIRVEESIYQCCDLAPEARQAIRSLTERLYIGGPLTNSKGQNCGYRRCRASGVLTTSCGNTLTCYLKAAAACRAAKLQDCTMLVCGDDLVVICESAGTQEDEASLRAFTEAMTRYSAPPGDPPKPEYDLELITSCSSNVSVAHDASGKRVYYLTRDPTTPLARAAWETARHTPVNSWLGNIIMYAPTIWARAILMTHFFSILLAQEQLEKTLDCQIYGACYSIEPLDLPQIIQRLHGLSAFSLHSYSPGEVNRVASCLRKLGVPPLRVWRHRARSVRARLLSQGGRAATCGKYLFNWAVRTKLKLTPIPAASQLDLSSWFVAGYSGGDIYHSLSRARPRWFMWCLLLLSVGVGIYLLPNR

SEQ ID NO: 274 - protein, 591 aa, Artificial Sequence
  Synthetic peptide
SMSYTWTGALITPCAAEETKLPINALSNSLLRHHNLVYATTSRSASLRQKKVTFDRLQVLDDHYRDVLKEMKAKASTVKAKLLSVEEACKLTPPHSARSKFGYGAKDVRNLSSKAVNHIRSVWKDLLEDTETPIDTTIMAKNEVFCVQPEKGGRKPARLIVFPDLGVRVCEKMALYDVVSTLPQAVMGSSYGFQYSPGQRVEFLVNAWKAKKCPMGFAYDTRCFDSTVTENDIRVEESIYQCCDLAPEARQAIRSLTERLYIGGPLTNSKGQNCGYRRCRASGVLTTSCGNTLTCYLKAAAACRAAKLQDCTMLVCGDDLVVICESAGTQEDEASLRAFTEAMTRYSAPPGDPPKPEYDLELITSCSSNVSVAHDASGKRVYYLTRDPTTPLARAAWETARHTPVNSWLGNIIMYAPTIWARAILMTHFFSILLAQEQLEKTLDCQIYGACYSIEPLDLPQIIQRLHGLSAFSLHSYSPGEVNRVVSCLRKLGVPPLRVWRHRARSVRARLLSQGGRAATCGKYLFNWAVRTKLKLTPIPAASQLDLSSWFVAGYSGGDIYHSLSRARPRWFMWCLLLLSVGVGIYLLPNR

SEQ ID NO: 275 - protein, 591 aa, Artificial Sequence
  Synthetic peptide
SMSYTWTGALITPCAAEETKLPINALSNSLLRHHNLVYATTSRSASLRQKKVTFDRLQVLDDHYRDVLKEMKAKASTVKAKLLSVEEACKLTPPHSARSKFGYGAKDVRNLSSKAVNHIRSVWKDLLEDTETPIDTTIMAKNEVFCVQPEKGGRKPARLIVFPDLGVRVCEKMALYDVVSTLPQAVMGSSYGFQYSPGQRVEFLVNAWKAKKCPMGFAYDTRCFDSTVTENDIRVEESIYQCCDLAPEARQAIRSLTERLYIGGPLTNSKGQNCGYRRCRASGVLTTSCGNTLTCYLKAAAACRAAKLQDCTMLVCGDDLVVICESAGTQEDEASLRAFTEAMTRYSAPPGDPPKPEYDLELITSCSSNVSVAHDASGKRVYYLTRDPTTPLARAAWETARHTPVNSWLGNIIMYAPTIWARAILMTHFFSILLAQEQLEKTLDCQIYGACYSIEPLDLPQIIQRLHGLSAFSLHSYSPGEVNRVISCLRKLGVPPLRVWRHRARSVRARLLSQGGRAATCGKYLFNWAVRTKLKLTPIPAASQLDLSSWFVAGYSGGDIYHSLSRARPRWFMWCLLLLSVGVGIYLLPNR

SEQ ID NO: 276 - protein, 591 aa, Artificial Sequence
  Synthetic peptide
SMSYTWTGALITPCAAEETKLPINALSNSLLRHHNLVYATTSRSASLRQKKVTFDRLQVLDDHYRDVLKEMKAKASTVKAKLLSVEEACKLTPPHSARSKFGYGAKDVRNLSSKAVNHIRSVWKDLLEDTETPIDTTIMAKNEVFCVQPEKGGRKPARLIVFPDLGVRVCEKMALYDVVSTLPQAVMGSSYGFQYSPGQRVEFLVNAWKAKKCPMGFAYDTRCFDSTVTENDIRVEESIYQCCDLAPEARQAIRSLTERLYIGGPLTNSKGQNCGYRRCRASGVLTTSCGNTLTCYLKAAAACRAAKLQDCTMLVCGDDLVVICESAGTQEDEASLRAFTEAMTRYSAPPGDPPKPEYDLELITSCSSNVSVAHDASGKRVYYLTRDPTTPLARAAWETARHTPVNSWLGNIIMYAPTIWARAILMTHFFSILLAQEQLEKTLDCQIYGACYSIEPLDLPQIIQRLHGLSAFSLHSYSPGEVNRVTSCLRKLGVPPLRVWRHRARSVRARLLSQGGRAATCGKYLFNWAVRTKLKLTPIPAASQLDLSSWFVAGYSGGDIYHSLSRARPRWFMWCLLLLSVGVGIYLLPNR

SEQ ID NO: 277 - protein, 591 aa, Artificial Sequence
  Synthetic peptide
SMSYTWTGALITPCAAEETKLPINALSNSLLRHHNLVYATTSRSASLRQKKVTFDRLQVLDDHYRDVLKEMKAKASTVKAKLLSVEEACKLTPPHSARSKFGYGAKDVRNLSSKAVNHIRSVWKDLLEDTETPIDTTIMAKNEVFCVQPEKGGRKPARLIVFPDLGVRVCEKMALYDVVSTLPQAVMGSSYGFQYSPGQRVEFLVNAWKAKKCPMGFAYDTRCFDSTVTENDIRVEESIYQCCDLAPEARQAIRSLTERLYIGGPLTNSKGQNCGYRRCRASGVLTTSCGNTLTCYLKAAAACRAAKLQDCTMLVCGDDLVVICESAGTQEDEASLRAFTEAMTRYSAPPGDPPKPEYDLELITSCSSNVSVAHDASGKRVYYLTRDPTTPLARAAWETARHTPVNSWLGNIIMYAPTIWARAILMTHFFSILLAQEQLEKTLDCQIYGACYSIEPLDLPQIIQRLHGLSAFSLHSYSPGEVNRVSSCLRKLGVPPLRVWRHRARSVRARLLSQGGRAATCGKYLFNWAVRTKLKLTPIPAASQLDLSSWFVAGYSGGDIYHSLSRARPRWFMWCLLLLSVGVGIYLLPNR

SEQ ID NO: 278 - protein, 591 aa, Artificial Sequence
  Synthetic peptide
SMSYTWTGALITPCAAEETKLPINALSNSLLRHHNLVYATTSRSASLRQKKVTFDRLQVLDDHYRDVLKEMKAKASTVKAKLLSVEEACKLTPPHSARSKFGYGAKDVRNLSSKAVNHIRSVWKDLLEDTETPIDTTIMAKNEVFCVQPEKGGRKPARLIVFPDLGVRVCEKMALYDVVSTLPQAVMGSSYGFQYSPGQRVEFLVNAWKAKKCPMGFAYDTRCFDSTVTENDIRVEESIYQCCDLAPEARQAIRSLTERLYIGGPLTNSKGQNCGYRRCRASGVLTTSCGNTLTCYLKAAAACRAAKLQDCTMLVCGDDLVVICESAGTQEDEASLRAFTEAMTRYSAPPGDPPKPEYDLELITSCSSNVSVAHDASGKRVYYLTRDPTTPLARAAWETARHTPVNSWLGNIIMYAPTIWARAILMTHFFSILLAQEQLEKTLDCQIYGACYSIEPLDLPQIIQRLHGLSAFSLHSYSPGEVNRVASCLRKLGIPPLRVWRHRARSVRARLLSQGGRAATCGKYLFNWAVRTKLKLTPIPAASQLDLSSWFVAGYSGGDIYHSLSRARPRWFMWCLLLLSVGVGIYLLPNR

SEQ ID NO: 279 - protein, 591 aa, Artificial Sequence
  Synthetic peptide
SMSYTWTGALITPCAAEETKLPINALSNSLLRHHNLVYATTSRSASLRQKKVTFDRLQVLDDHYRDVLKEMKAKASTVKAKLLSVEEACKLTPPHSARSKFGYGAKDVRNLSSKAVNHIRSVWKDLLEDTETPIDTTIMAKNEVFCVQPEKGGRKPARLIVFPDLGVRVCEKMALYDVVSTLPQAVMGSSYGFQYSPGQRVEFLVNAWKAKKCPMGFAYDTRCFDSTVTENDIRVEESIYQCCDLAPEARQAIRSLTERLYIGGPLTNSKGQNCGYRRCRASGVLTTSCGNTLTCYLKAAAACRAAKLQDCTMLVCGDDLVVICESAGTQEDEASLRAFTEAMTRYSAPPGDPPKPEYDLELITSCSSNVSVAHDASGKRVYYLTRDPTTPLARAAWETARHTPVNSWLGNIIMYAPTIWARAILMTHFFSILLAQEQLEKTLDCQIYGACYSIEPLDLPQIIQRLHGLSAFSLHSYSPGEVNRVVSCLRKLGIPPLRVWRHRARSVRARLLSQGGRAATCGKYLFNWAVRTKLKLTPIPAASQLDLSSWFVAGYSGGDIYHSLSRARPRWFMWCLLLLSVGVGIYLLPNR

SEQ ID NO: 280 - protein, 591 aa, Artificial Sequence
  Synthetic peptide
SMSYTWTGALITPCAAEETKLPINALSNSLLRHHNLVYATTSRSASLRQKKVTFDRLQVLDDHYRDVLKEMKAKASTVKAKLLSVEEACKLTPPHSARSKFGYGAKDVRNLSSKAVNHIRSVWKDLLEDTETPIDTTIMAKNEVFCVQPEKGGRKPARLIVFPDLGVRVCEKMALYDVVSTLPQAVMGSSYGFQYSPGQRVEFLVNAWKAKKCPMGFAYDTRCFDSTVTENDIRVEESIYQCCDLAPEARQAIRSLTERLYIGGPLTNSKGQNCGYRRCRASGVLTTSCGNTLTCYLKAAAACRAAKLQDCTMLVCGDDLVVICESAGTQEDEASLRAFTEAMTRYSAPPGDPPKPEYDLELITSCSSNVSVAHDASGKRVYYLTRDPTTPLARAAWETARHTPVNSWLGNIIMYAPTIWARAILMTHFFSILLAQEQLEKTLDCQIYGACYSIEPLDLPQIIQRLHGLSAFSLHSYSPGEVNRVISCLRKLGIPPLRVWRHRARSVRARLLSQGGRAATCGKYLFNWAVRTKLKLTPIPAASQLDLSSWFVAGYSGGDIYHSLSRARPRWFMWCLLLLSVGVGIYLLPNR

SEQ ID NO: 281 - protein, 591 aa, Artificial Sequence
  Synthetic peptide
SMSYTWTGALITPCAAEETKLPINALSNSLLRHHNLVYATTSRSASLRQKKVTFDRLQVLDDHYRDVLKEMKAKASTVKAKLLSVEEACKLTPPHSARSKFGYGAKDVRNLSSKAVNHIRSVWKDLLEDTETPIDTTIMAKNEVFCVQPEKGGRKPARLIVFPDLGVRVCEKMALYDVVSTLPQAVMGSSYGFQYSPGQRVEFLVNAWKAKKCPMGFAYDTRCFDSTVTENDIRVEESIYQCCDLAPEARQAIRSLTERLYIGGPLTNSKGQNCGYRRCRASGVLTTSCGNTLTCYLKAAAACRAAKLQDCTMLVCGDDLVVICESAGTQEDEASLRAFTEAMTRYSAPPGDPPKPEYDLELITSCSSNVSVAHDASGKRVYYLTRDPTTPLARAAWETARHTPVNSWLGNIIMYAPTIWARAILMTHFFSILLAQEQLEKTLDCQIYGACYSIEPLDLPQIIQRLHGLSAFSLHSYSPGEVNRVTSCLRKLGIPPLRVWRHRARSVRARLLSQGGRAATCGKYLFNWAVRTKLKLTPIPAASQLDLSSWFVAGYSGGDIYHSLSRARPRWFMWCLLLLSVGVGIYLLPNR

SEQ ID NO: 282 - protein, 591 aa, Artificial Sequence
  Synthetic peptid
SMSYTWTGALITPCAAEETKLPINALSNSLLRHHNLVYATTSRSASLRQKKVTFDRLQVLDDHYRDVLKEMKAKASTVKAKLLSVEEACKLTPPHSARSKFGYGAKDVRNLSSKAVNHIRSVWKDLLEDTETPIDTTIMAKNEVFCVQPEKGGRKPARLIVFPDLGVRVCEKMALYDVVSTLPQAVMGSSYGFQYSPGQRVEFLVNAWKAKKCPMGFAYDTRCFDSTVTENDIRVEESIYQCCDLAPEARQAIRSLTERLYIGGPLTNSKGQNCGYRRCRASGVLTTSCGNTLTCYLKAAAACRAAKLQDCTMLVCGDDLVVICESAGTQEDEASLRAFTEAMTRYSAPPGDPPKPEYDLELITSCSSNVSVAHDASGKRVYYLTRDPTTPLARAAWETARHTPVNSWLGNIIMYAPTIWARAILMTHFFSILLAQEQLEKTLDCQIYGACYSIEPLDLPQIIQRLHGLSAFSLHSYSPGEVNRVSSCLRKLGIPPLRVWRHRARSVRARLLSQGGRAATCGKYLFNWAVRTKLKLTPIPAASQLDLSSWFVAGYSGGDIYHSLSRARPRWFMWCLLLLSVGVGIYLLPNR

SEQ ID NO: 283 - protein, 591 aa, Artificial Sequence
  Synthetic peptide
SMSYTWTGALITPCAAEETKLPINALSNSLLRHHNLVYATTSRSASLRQKKVTFDRLQVLDDHYRDVLKEMKAKASTVKAKLLSVEEACKLTPPHSARSKFGYGAKDVRNLSSKAVNHIRSVWKDLLEDTETPIDTTIMAKNEVFCVQPEKGGRKPARLIVFPDLGVRVCEKMALYDVVSTLPQAVMGSSYGFQYSPGQRVEFLVNAWKAKKCPMGFAYDTRCFDSTVTENDIRVEESIYQCCDLAPEARQAIRSLTERLYIGGPLTNSKGQNCGYRRCRASGVLTTSCGNTLTCYLKAAAACRAAKLQDCTMLVCGDDLVVICESAGTQEDEASLRAFTEAMTRYSAPPGDPPKPEYDLELITSCSSNVSVAHDASGKRVYYLTRDPTTPLARAAWETARHTPVNSWLGNIIMYAPTIWARMILMTHFFSILLAQEQLEKTLDCQIYGACYSIEPLDLPQIIQRLHGLSAFSLHSYSPGEDNRVASCLRKLGVPPLRVWRHRARSVRARLLSQGGRAATCGKYLFNWAVRTKLKLTPIPAASQLDLSSWFVAGYSGGDIYHSLSRARPRWFMWCLLLLSVGVGIYLLPNR

SEQ ID NO: 284 - protein, 591 aa, Artificial Sequence
  Synthetic peptide
SMSYTWTGALITPCAAEETKLPINALSNSLLRHHNLVYATTSRSASLRQKKVTFDRLQVLDDHYRDVLKEMKAKASTVKAKLLSVEEACKLTPPHSARSKFGYGAKDVRNLSSKAVNHIRSVWKDLLEDTETPIDTTIMAKNEVFCVQPEKGGRKPARLIVFPDLGVRVCEKMALYDVVSTLPQAVMGSSYGFQYSPGQRVEFLVNAWKAKKCPMGFAYDTRCFDSTVTENDIRVEESIYQCCDLAPEARQAIRSLTERLYIGGPLTNSKGQNCGYRRCRASGVLTTSCGNTLTCYLKAAAACRAAKLQDCTMLVCGDDLVVICESAGTQEDEASLRAFTEAMTRYSAPPGDPPKPEYDLELITSCSSNVSVAHDASGKRVYYLTRDPTTPLARAAWETARHTPVNSWLGNIIMYAPTIWARMILMTHFFSILLAQEQLEKTLDCQIYGACYSIEPLDLPQIIQRLHGLSAFSLHSYSPGEDNRVVSCLRKLGVPPLRVWRHRARSVRARLLSQGGRAATCGKYLFNWAVRTKLKLTPIPAASQLDLSSWFVAGYSGGDIYHSLSRARPRWFMWCLLLLSVGVGIYLLPNR

SEQ ID NO: 285 - protein, 591 aa, Artificial Sequence
  Synthetic peptide
SMSYTWTGALITPCAAEETKLPINALSNSLLRHHNLVYATTSRSASLRQKKVTFDRLQVLDDHYRDVLKEMKAKASTVKAKLLSVEEACKLTPPHSARSKFGYGAKDVRNLSSKAVNHIRSVWKDLLEDTETPIDTTIMAKNEVFCVQPEKGGRKPARLIVFPDLGVRVCEKMALYDVVSTLPQAVMGSSYGFQYSPGQRVEFLVNAWKAKKCPMGFAYDTRCFDSTVTENDIRVEESIYQCCDLAPEARQAIRSLTERLYIGGPLTNSKGQNCGYRRCRASGVLTTSCGNTLTCYLKAAAACRAAKLQDCTMLVCGDDLVVICESAGTQEDEASLRAFTEAMTRYSAPPGDPPKPEYDLELITSCSSNVSVAHDASGKRVYYLTRDPTTPLARAAWETARHTPVNSWLGNIIMYAPTIWARMILMTHFFSILLAQEQLEKTLDCQIYGACYSIEPLDLPQIIQRLHGLSAFSLHSYSPGEDNRVISCLRKLGVPPLRVWRHRARSVRARLLSQGGRAATCGKYLFNWAVRTKLKLTPIPAASQLDLSSWFVAGYSGGDIYHSLSRARPRWFMWCLLLLSVGVGIYLLPNR

SEQ ID NO: 286 - protein, 591 aa, Artificial Sequence
  Synthetic peptide
SMSYTWTGALITPCAAEETKLPINALSNSLLRHHNLVYATTSRSASLRQKKVTFDRLQVLDDHYRDVLKEMKAKASTVKAKLLSVEEACKLTPPHSARSKFGYGAKDVRNLSSKAVNHIRSVWKDLLEDTETPIDTTIMAKNEVFCVQPEKGGRKPARLIVFPDLGVRVCEKMALYDVVSTLPQAVMGSSYGFQYSPGQRVEFLVNAWKAKKCPMGFAYDTRCFDSTVTENDIRVEESIYQCCDLAPEARQAIRSLTERLYIGGPLTNSKGQNCGYRRCRASGVLTTSCGNTLTCYLKAAAACRAAKLQDCTMLVCGDDLVVICESAGTQEDEASLRAFTEAMTRYSAPPGDPPKPEYDLELITSCSSNVSVAHDASGKRVYYLTRDPTTPLARAAWETARHTPVNSWLGNIIMYAPTIWARMILMTHFFSILLAQEQLEKTLDCQIYGACYSIEPLDLPQIIQRLHGLSAFSLHSYSPGEDNRVTSCLRKLGVPPLRVWRHRARSVRARLLSQGGRAATCGKYLFNWAVRTKLKLTPIPAASQLDLSSWFVAGYSGGDIYHSLSRARPRWFMWCLLLLSVGVGIYLLPNR

SEQ ID NO: 287 - protein, 591 aa, Artificial Sequence
  Synthetic peptide
SMSYTWTGALITPCAAEETKLPINALSNSLLRHHNLVYATTSRSASLRQKKVTFDRLQVLDDHYRDVLKEMKAKASTVKAKLLSVEEACKLTPPHSARSKFGYGAKDVRNLSSKAVNHIRSVWKDLLEDTETPIDTTIMAKNEVFCVQPEKGGRKPARLIVFPDLGVRVCEKMALYDVVSTLPQAVMGSSYGFQYSPGQRVEFLVNAWKAKKCPMGFAYDTRCFDSTVTENDIRVEESIYQCCDLAPEARQAIRSLTERLYIGGPLTNSKGQNCGYRRCRASGVLTTSCGNTLTCYLKAAAACRAAKLQDCTMLVCGDDLVVICESAGTQEDEASLRAFTEAMTRYSAPPGDPPKPEYDLELITSCSSNVSVAHDASGKRVYYLTRDPTTPLARAAWETARHTPVNSWLGNIIMYAPTIWARMILMTHFFSILLAQEQLEKTLDCQIYGACYSIEPLDLPQIIQRLHGLSAFSLHSYSPGEDNRVSSCLRKLGVPPLRVWRHRARSVRARLLSQGGRAATCGKYLFNWAVRTKLKLTPIPAASQLDLSSWFVAGYSGGDIYHSLSRARPRWFMWCLLLLSVGVGIYLLPNR

SEQ ID NO: 288 - protein, 591 aa, Artificial Sequence
  Synthetic peptide
SMSYTWTGALITPCAAEETKLPINALSNSLLRHHNLVYATTSRSASLRQKKVTFDRLQVLDDHYRDVLKEMKAKASTVKAKLLSVEEACKLTPPHSARSKFGYGAKDVRNLSSKAVNHIRSVWKDLLEDTETPIDTTIMAKNEVFCVQPEKGGRKPARLIVFPDLGVRVCEKMALYDVVSTLPQAVMGSSYGFQYSPGQRVEFLVNAWKAKKCPMGFAYDTRCFDSTVTENDIRVEESIYQCCDLAPEARQAIRSLTERLYIGGPLTNSKGQNCGYRRCRASGVLTTSCGNTLTCYLKAAAACRAAKLQDCTMLVCGDDLVVICESAGTQEDEASLRAFTEAMTRYSAPPGDPPKPEYDLELITSCSSNVSVAHDASGKRVYYLTRDPTTPLARAAWETARHTPVNSWLGNIIMYAPTIWARMILMTHFFSILLAQEQLEKTLDCQIYGACYSIEPLDLPQIIQRLHGLSAFSLHSYSPGEDNRVASCLRKLGIPPLRVWRHRARSVRARLLSQGGRAATCGKYLFNWAVRTKLKLTPIPAASQLDLSSWFVAGYSGGDIYHSLSRARPRWFMWCLLLLSVGVGIYLLPNR

SEQ ID NO: 289 - protein, 591 aa, Artificial Sequence
  Synthetic peptide
SMSYTWTGALITPCAAEETKLPINALSNSLLRHHNLVYATTSRSASLRQKKVTFDRLQVLDDHYRDVLKEMKAKASTVKAKLLSVEEACKLTPPHSARSKFGYGAKDVRNLSSKAVNHIRSVWKDLLEDTETPIDTTIMAKNEVFCVQPEKGGRKPARLIVFPDLGVRVCEKMALYDVVSTLPQAVMGSSYGFQYSPGQRVEFLVNAWKAKKCPMGFAYDTRCFDSTVTENDIRVEESIYQCCDLAPEARQAIRSLTERLYIGGPLTNSKGQNCGYRRCRASGVLTTSCGNTLTCYLKAAAACRAAKLQDCTMLVCGDDLVVICESAGTQEDEASLRAFTEAMTRYSAPPGDPPKPEYDLELITSCSSNVSVAHDASGKRVYYLTRDPTTPLARAAWETARHTPVNSWLGNIIMYAPTIWARMILMTHFFSILLAQEQLEKTLDCQIYGACYSIEPLDLPQIIQRLHGLSAFSLHSYSPGEDNRVVSCLRKLGIPPLRVWRHRARSVRARLLSQGGRAATCGKYLFNWAVRTKLKLTPIPAASQLDLSSWFVAGYSGGDIYHSLSRARPRWFMWCLLLLSVGVGIYLLPNR

SEQ ID NO: 290 - protein, 591 aa, Artificial Sequence
  Synthetic peptide
SMSYTWTGALITPCAAEETKLPINALSNSLLRHHNLVYATTSRSASLRQKKVTFDRLQVLDDHYRDVLKEMKAKASTVKAKLLSVEEACKLTPPHSARSKFGYGAKDVRNLSSKAVNHIRSVWKDLLEDTETPIDTTIMAKNEVFCVQPEKGGRKPARLIVFPDLGVRVCEKMALYDVVSTLPQAVMGSSYGFQYSPGQRVEFLVNAWKAKKCPMGFAYDTRCFDSTVTENDIRVEESIYQCCDLAPEARQAIRSLTERLYIGGPLTNSKGQNCGYRRCRASGVLTTSCGNTLTCYLKAAAACRAAKLQDCTMLVCGDDLVVICESAGTQEDEASLRAFTEAMTRYSAPPGDPPKPEYDLELITSCSSNVSVAHDASGKRVYYLTRDPTTPLARAAWETARHTPVNSWLGNIIMYAPTIWARMILMTHFFSILLAQEQLEKTLDCQIYGACYSIEPLDLPQIIQRLHGLSAFSLHSYSPGEDNRVISCLRKLGIPPLRVWRHRARSVRARLLSQGGRAATCGKYLFNWAVRTKLKLTPIPAASQLDLSSWFVAGYSGGDIYHSLSRARPRWFMWCLLLLSVGVGIYLLPNR

SEQ ID NO: 291 - protein, 591 aa, Artificial Sequence
  Synthetic peptide
SMSYTWTGALITPCAAEETKLPINALSNSLLRHHNLVYATTSRSASLRQKKVTFDRLQVLDDHYRDVLKEMKAKASTVKAKLLSVEEACKLTPPHSARSKFGYGAKDVRNLSSKAVNHIRSVWKDLLEDTETPIDTTIMAKNEVFCVQPEKGGRKPARLIVFPDLGVRVCEKMALYDVVSTLPQAVMGSSYGFQYSPGQRVEFLVNAWKAKKCPMGFAYDTRCFDSTVTENDIRVEESIYQCCDLAPEARQAIRSLTERLYIGGPLTNSKGQNCGYRRCRASGVLTTSCGNTLTCYLKAAAACRAAKLQDCTMLVCGDDLVVICESAGTQEDEASLRAFTEAMTRYSAPPGDPPKPEYDLELITSCSSNVSVAHDASGKRVYYLTRDPTTPLARAAWETARHTPVNSWLGNIIMYAPTIWARMILMTHFFSILLAQEQLEKTLDCQIYGACYSIEPLDLPQIIQRLHGLSAFSLHSYSPGEDNRVTSCLRKLGIPPLRVWRHRARSVRARLLSQGGRAATCGKYLFNWAVRTKLKLTPIPAASQLDLSSWFVAGYSGGDIYHSLSRARPRWFMWCLLLLSVGVGIYLLPNR

SEQ ID NO: 292 - protein, 591 aa, Artificial Sequence
  Synthetic peptid
SMSYTWTGALITPCAAEETKLPINALSNSLLRHHNLVYATTSRSASLRQKKVTFDRLQVLDDHYRDVLKEMKAKASTVKAKLLSVEEACKLTPPHSARSKFGYGAKDVRNLSSKAVNHIRSVWKDLLEDTETPIDTTIMAKNEVFCVQPEKGGRKPARLIVFPDLGVRVCEKMALYDVVSTLPQAVMGSSYGFQYSPGQRVEFLVNAWKAKKCPMGFAYDTRCFDSTVTENDIRVEESIYQCCDLAPEARQAIRSLTERLYIGGPLTNSKGQNCGYRRCRASGVLTTSCGNTLTCYLKAAAACRAAKLQDCTMLVCGDDLVVICESAGTQEDEASLRAFTEAMTRYSAPPGDPPKPEYDLELITSCSSNVSVAHDASGKRVYYLTRDPTTPLARAAWETARHTPVNSWLGNIIMYAPTIWARMILMTHFFSILLAQEQLEKTLDCQIYGACYSIEPLDLPQIIQRLHGLSAFSLHSYSPGEDNRVSSCLRKLGIPPLRVWRHRARSVRARLLSQGGRAATCGKYLFNWAVRTKLKLTPIPAASQLDLSSWFVAGYSGGDIYHSLSRARPRWFMWCLLLLSVGVGIYLLPNR

SEQ ID NO: 293 - protein, 591 aa, Artificial Sequence
  Synthetic peptide
SMSYTWTGALITPCAAEETKLPINALSNSLLRHHNLVYATTSRSASLRQKKVTFDRLQVLDDHYRDVLKEMKAKASTVKAKLLSVEEACKLTPPHSARSKFGYGAKDVRNLSSKAVNHIRSVWKDLLEDTETPIDTTIMAKNEVFCVQPEKGGRKPARLIVFPDLGVRVCEKMALYDVVSTLPQAVMGSSYGFQYSPGQRVEFLVNAWKAKKCPMGFAYDTRCFDSTVTENDIRVEESIYQCCDLAPEARQAIRSLTERLYIGGPLTNSKGQNCGYRRCRASGVLTTSCGNTLTCYLKAAAACRAAKLQDCTMLVCGDDLVVICESAGTQEDEASLRAFTEAMTRYSAPPGDPPKPEYDLELITSCSSNVSVAHDASGKRVYYLTRDPTTPLARAAWETARHTPVNSWLGNIIMYAPTIWARAILMTHFFSILLAQEQLEKTLDCQIYGACYSIEPLDLPQIIQRLHGLSAFSLHSYSPGEDNRVASCLRKLGVPPLRVWRHRARSVRARLLSQGGRAATCGKYLFNWAVRTKLKLTPIPAASQLDLSSWFVAGYSGGDIYHSLSRARPRWFMWCLLLLSVGVGIYLLPNR

SEQ ID NO: 294 - protein, 591 aa, Artificial Sequence
  Synthetic peptide
SMSYTWTGALITPCAAEETKLPINALSNSLLRHHNLVYATTSRSASLRQKKVTFDRLQVLDDHYRDVLKEMKAKASTVKAKLLSVEEACKLTPPHSARSKFGYGAKDVRNLSSKAVNHIRSVWKDLLEDTETPIDTTIMAKNEVFCVQPEKGGRKPARLIVFPDLGVRVCEKMALYDVVSTLPQAVMGSSYGFQYSPGQRVEFLVNAWKAKKCPMGFAYDTRCFDSTVTENDIRVEESIYQCCDLAPEARQAIRSLTERLYIGGPLTNSKGQNCGYRRCRASGVLTTSCGNTLTCYLKAAAACRAAKLQDCTMLVCGDDLVVICESAGTQEDEASLRAFTEAMTRYSAPPGDPPKPEYDLELITSCSSNVSVAHDASGKRVYYLTRDPTTPLARAAWETARHTPVNSWLGNIIMYAPTIWARAILMTHFFSILLAQEQLEKTLDCQIYGACYSIEPLDLPQIIQRLHGLSAFSLHSYSPGEDNRVVSCLRKLGVPPLRVWRHRARSVRARLLSQGGRAATCGKYLFNWAVRTKLKLTPIPAASQLDLSSWFVAGYSGGDIYHSLSRARPRWFMWCLLLLSVGVGIYLLPNR

SEQ ID NO: 295 - protein, 591 aa, Artificial Sequence
  Synthetic peptide
SMSYTWTGALITPCAAEETKLPINALSNSLLRHHNLVYATTSRSASLRQKKVTFDRLQVLDDHYRDVLKEMKAKASTVKAKLLSVEEACKLTPPHSARSKFGYGAKDVRNLSSKAVNHIRSVWKDLLEDTETPIDTTIMAKNEVFCVQPEKGGRKPARLIVFPDLGVRVCEKMALYDVVSTLPQAVMGSSYGFQYSPGQRVEFLVNAWKAKKCPMGFAYDTRCFDSTVTENDIRVEESIYQCCDLAPEARQAIRSLTERLYIGGPLTNSKGQNCGYRRCRASGVLTTSCGNTLTCYLKAAAACRAAKLQDCTMLVCGDDLVVICESAGTQEDEASLRAFTEAMTRYSAPPGDPPKPEYDLELITSCSSNVSVAHDASGKRVYYLTRDPTTPLARAAWETARHTPVNSWLGNIIMYAPTIWARAILMTHFFSILLAQEQLEKTLDCQIYGACYSIEPLDLPQIIQRLHGLSAFSLHSYSPGEDNRVISCLRKLGVPPLRVWRHRARSVRARLLSQGGRAATCGKYLFNWAVRTKLKLTPIPAASQLDLSSWFVAGYSGGDIYHSLSRARPRWFMWCLLLLSVGVGIYLLPNR

SEQ ID NO: 296 - protein, 591 aa, Artificial Sequence
  Synthetic peptide
SMSYTWTGALITPCAAEETKLPINALSNSLLRHHNLVYATTSRSASLRQKKVTFDRLQVLDDHYRDVLKEMKAKASTVKAKLLSVEEACKLTPPHSARSKFGYGAKDVRNLSSKAVNHIRSVWKDLLEDTETPIDTTIMAKNEVFCVQPEKGGRKPARLIVFPDLGVRVCEKMALYDVVSTLPQAVMGSSYGFQYSPGQRVEFLVNAWKAKKCPMGFAYDTRCFDSTVTENDIRVEESIYQCCDLAPEARQAIRSLTERLYIGGPLTNSKGQNCGYRRCRASGVLTTSCGNTLTCYLKAAAACRAAKLQDCTMLVCGDDLVVICESAGTQEDEASLRAFTEAMTRYSAPPGDPPKPEYDLELITSCSSNVSVAHDASGKRVYYLTRDPTTPLARAAWETARHTPVNSWLGNIIMYAPTIWARAILMTHFFSILLAQEQLEKTLDCQIYGACYSIEPLDLPQIIQRLHGLSAFSLHSYSPGEDNRVTSCLRKLGVPPLRVWRHRARSVRARLLSQGGRAATCGKYLFNWAVRTKLKLTPIPAASQLDLSSWFVAGYSGGDIYHSLSRARPRWFMWCLLLLSVGVGIYLLPNR

SEQ ID NO: 297 - protein, 591 aa, Artificial Sequence
  Synthetic peptide
SMSYTWTGALITPCAAEETKLPINALSNSLLRHHNLVYATTSRSASLRQKKVTFDRLQVLDDHYRDVLKEMKAKASTVKAKLLSVEEACKLTPPHSARSKFGYGAKDVRNLSSKAVNHIRSVWKDLLEDTETPIDTTIMAKNEVFCVQPEKGGRKPARLIVFPDLGVRVCEKMALYDVVSTLPQAVMGSSYGFQYSPGQRVEFLVNAWKAKKCPMGFAYDTRCFDSTVTENDIRVEESIYQCCDLAPEARQAIRSLTERLYIGGPLTNSKGQNCGYRRCRASGVLTTSCGNTLTCYLKAAAACRAAKLQDCTMLVCGDDLVVICESAGTQEDEASLRAFTEAMTRYSAPPGDPPKPEYDLELITSCSSNVSVAHDASGKRVYYLTRDPTTPLARAAWETARHTPVNSWLGNIIMYAPTIWARAILMTHFFSILLAQEQLEKTLDCQIYGACYSIEPLDLPQIIQRLHGLSAFSLHSYSPGEDNRVSSCLRKLGVPPLRVWRHRARSVRARLLSQGGRAATCGKYLFNWAVRTKLKLTPIPAASQLDLSSWFVAGYSGGDIYHSLSRARPRWFMWCLLLLSVGVGIYLLPNR

SEQ ID NO: 298 - protein, 591 aa, Artificial Sequence
  Synthetic peptide
SMSYTWTGALITPCAAEETKLPINALSNSLLRHHNLVYATTSRSASLRQKKVTFDRLQVLDDHYRDVLKEMKAKASTVKAKLLSVEEACKLTPPHSARSKFGYGAKDVRNLSSKAVNHIRSVWKDLLEDTETPIDTTIMAKNEVFCVQPEKGGRKPARLIVFPDLGVRVCEKMALYDVVSTLPQAVMGSSYGFQYSPGQRVEFLVNAWKAKKCPMGFAYDTRCFDSTVTENDIRVEESIYQCCDLAPEARQAIRSLTERLYIGGPLTNSKGQNCGYRRCRASGVLTTSCGNTLTCYLKAAAACRAAKLQDCTMLVCGDDLVVICESAGTQEDEASLRAFTEAMTRYSAPPGDPPKPEYDLELITSCSSNVSVAHDASGKRVYYLTRDPTTPLARAAWETARHTPVNSWLGNIIMYAPTIWARAILMTHFFSILLAQEQLEKTLDCQIYGACYSIEPLDLPQIIQRLHGLSAFSLHSYSPGEDNRVASCLRKLGIPPLRVWRHRARSVRARLLSQGGRAATCGKYLFNWAVRTKLKLTPIPAASQLDLSSWFVAGYSGGDIYHSLSRARPRWFMWCLLLLSVGVGIYLLPNR

SEQ ID NO: 299 - protein, 591 aa, Artificial Sequence
  Synthetic peptide
SMSYTWTGALITPCAAEETKLPINALSNSLLRHHNLVYATTSRSASLRQKKVTFDRLQVLDDHYRDVLKEMKAKASTVKAKLLSVEEACKLTPPHSARSKFGYGAKDVRNLSSKAVNHIRSVWKDLLEDTETPIDTTIMAKNEVFCVQPEKGGRKPARLIVFPDLGVRVCEKMALYDVVSTLPQAVMGSSYGFQYSPGQRVEFLVNAWKAKKCPMGFAYDTRCFDSTVTENDIRVEESIYQCCDLAPEARQAIRSLTERLYIGGPLTNSKGQNCGYRRCRASGVLTTSCGNTLTCYLKAAAACRAAKLQDCTMLVCGDDLVVICESAGTQEDEASLRAFTEAMTRYSAPPGDPPKPEYDLELITSCSSNVSVAHDASGKRVYYLTRDPTTPLARAAWETARHTPVNSWLGNIIMYAPTIWARAILMTHFFSILLAQEQLEKTLDCQIYGACYSIEPLDLPQIIQRLHGLSAFSLHSYSPGEDNRVVSCLRKLGIPPLRVWRHRARSVRARLLSQGGRAATCGKYLFNWAVRTKLKLTPIPAASQLDLSSWFVAGYSGGDIYHSLSRARPRWFMWCLLLLSVGVGIYLLPNR

SEQ ID NO: 300 - protein, 591 aa, Artificial Sequence
  Synthetic peptide
SMSYTWTGALITPCAAEETKLPINALSNSLLRHHNLVYATTSRSASLRQKKVTFDRLQVLDDHYRDVLKEMKAKASTVKAKLLSVEEACKLTPPHSARSKFGYGAKDVRNLSSKAVNHIRSVWKDLLEDTETPIDTTIMAKNEVFCVQPEKGGRKPARLIVFPDLGVRVCEKMALYDVVSTLPQAVMGSSYGFQYSPGQRVEFLVNAWKAKKCPMGFAYDTRCFDSTVTENDIRVEESIYQCCDLAPEARQAIRSLTERLYIGGPLTNSKGQNCGYRRCRASGVLTTSCGNTLTCYLKAAAACRAAKLQDCTMLVCGDDLVVICESAGTQEDEASLRAFTEAMTRYSAPPGDPPKPEYDLELITSCSSNVSVAHDASGKRVYYLTRDPTTPLARAAWETARHTPVNSWLGNIIMYAPTIWARAILMTHFFSILLAQEQLEKTLDCQIYGACYSIEPLDLPQIIQRLHGLSAFSLHSYSPGEDNRVISCLRKLGIPPLRVWRHRARSVRARLLSQGGRAATCGKYLFNWAVRTKLKLTPIPAASQLDLSSWFVAGYSGGDIYHSLSRARPRWFMWCLLLLSVGVGIYLLPNR

SEQ ID NO: 301 - protein, 591 aa, Artificial Sequence
  Synthetic peptide
SMSYTWTGALITPCAAEETKLPINALSNSLLRHHNLVYATTSRSASLRQKKVTFDRLQVLDDHYRDVLKEMKAKASTVKAKLLSVEEACKLTPPHSARSKFGYGAKDVRNLSSKAVNHIRSVWKDLLEDTETPIDTTIMAKNEVFCVQPEKGGRKPARLIVFPDLGVRVCEKMALYDVVSTLPQAVMGSSYGFQYSPGQRVEFLVNAWKAKKCPMGFAYDTRCFDSTVTENDIRVEESIYQCCDLAPEARQAIRSLTERLYIGGPLTNSKGQNCGYRRCRASGVLTTSCGNTLTCYLKAAAACRAAKLQDCTMLVCGDDLVVICESAGTQEDEASLRAFTEAMTRYSAPPGDPPKPEYDLELITSCSSNVSVAHDASGKRVYYLTRDPTTPLARAAWETARHTPVNSWLGNIIMYAPTIWARAILMTHFFSILLAQEQLEKTLDCQIYGACYSIEPLDLPQIIQRLHGLSAFSLHSYSPGEDNRVTSCLRKLGIPPLRVWRHRARSVRARLLSQGGRAATCGKYLFNWAVRTKLKLTPIPAASQLDLSSWFVAGYSGGDIYHSLSRARPRWFMWCLLLLSVGVGIYLLPNR

SEQ ID NO: 302 - protein, 591 aa, Artificial Sequence
  Synthetic peptid
SMSYTWTGALITPCAAEETKLPINALSNSLLRHHNLVYATTSRSASLRQKKVTFDRLQVLDDHYRDVLKEMKAKASTVKAKLLSVEEACKLTPPHSARSKFGYGAKDVRNLSSKAVNHIRSVWKDLLEDTETPIDTTIMAKNEVFCVQPEKGGRKPARLIVFPDLGVRVCEKMALYDVVSTLPQAVMGSSYGFQYSPGQRVEFLVNAWKAKKCPMGFAYDTRCFDSTVTENDIRVEESIYQCCDLAPEARQAIRSLTERLYIGGPLTNSKGQNCGYRRCRASGVLTTSCGNTLTCYLKAAAACRAAKLQDCTMLVCGDDLVVICESAGTQEDEASLRAFTEAMTRYSAPPGDPPKPEYDLELITSCSSNVSVAHDASGKRVYYLTRDPTTPLARAAWETARHTPVNSWLGNIIMYAPTIWARAILMTHFFSILLAQEQLEKTLDCQIYGACYSIEPLDLPQIIQRLHGLSAFSLHSYSPGEDNRVSSCLRKLGIPPLRVWRHRARSVRARLLSQGGRAATCGKYLFNWAVRTKLKLTPIPAASQLDLSSWFVAGYSGGDIYHSLSRARPRWFMWCLLLLSVGVGIYLLPNR

SEQ ID NO: 303 - protein, 591 aa, Artificial Sequence
  Synthetic peptide
SMSYTWTGALITPCAAEETKLPINALSNSLLRHHNLVYATTSRSASLRQKKVTFDRLQVLDDHYRDVLKEMKAKASTVKAKLLSVEEACKLTPPHSARSKFGYGAKDVRNLSSKAVNHIRSVWKDLLEDTETPIDTTIMAKNEVFCVQPEKGGRKPARLIVFPDLGVRVCEKMALYDVVSTLPQAVMGSSYGFQYSPGQRVEFLVNAWKAKKCPMGFAYDTRCFDSTVTENDIRVEESIYQCCDLAPEARQAIRSLTERLYIGGPLTNSKGQNCGYRRCRASGVLTTSCGNTLTCYLKAAAACRAAKLQDCTMLVCGDDLVVICESAGTQEDEASLRAFTEAMTRYSAPPGDPPKPEYDLELITSCSSNVSVAHDASGKRVYYLTRDPTTPLARAAWETARHTPVNSWLGNIIMYAPTVWARMILMTHFFSILLAQEQLEKTLDCQIYGACYSIEPLDLPQIIQRLHGLSAFSLHSYSPGEINRVASCLRKLGVPPLRVWRHRARSVRARLLSQGGRAATCGKYLFNWAVRTKLKLTPIPAASQLDLSSWFVAGYSGGDIYHSLSRARPRWFMWCLLLLSVGVGIYLLPNR

SEQ ID NO: 304 - protein, 591 aa, Artificial Sequence
  Synthetic peptide
SMSYTWTGALITPCAAEETKLPINALSNSLLRHHNLVYATTSRSASLRQKKVTFDRLQVLDDHYRDVLKEMKAKASTVKAKLLSVEEACKLTPPHSARSKFGYGAKDVRNLSSKAVNHIRSVWKDLLEDTETPIDTTIMAKNEVFCVQPEKGGRKPARLIVFPDLGVRVCEKMALYDVVSTLPQAVMGSSYGFQYSPGQRVEFLVNAWKAKKCPMGFAYDTRCFDSTVTENDIRVEESIYQCCDLAPEARQAIRSLTERLYIGGPLTNSKGQNCGYRRCRASGVLTTSCGNTLTCYLKAAAACRAAKLQDCTMLVCGDDLVVICESAGTQEDEASLRAFTEAMTRYSAPPGDPPKPEYDLELITSCSSNVSVAHDASGKRVYYLTRDPTTPLARAAWETARHTPVNSWLGNIIMYAPTVWARMILMTHFFSILLAQEQLEKTLDCQIYGACYSIEPLDLPQIIQRLHGLSAFSLHSYSPGEINRVVSCLRKLGVPPLRVWRHRARSVRARLLSQGGRAATCGKYLFNWAVRTKLKLTPIPAASQLDLSSWFVAGYSGGDIYHSLSRARPRWFMWCLLLLSVGVGIYLLPNR

SEQ ID NO: 305 - protein, 591 aa, Artificial Sequence
  Synthetic peptide
SMSYTWTGALITPCAAEETKLPINALSNSLLRHHNLVYATTSRSASLRQKKVTFDRLQVLDDHYRDVLKEMKAKASTVKAKLLSVEEACKLTPPHSARSKFGYGAKDVRNLSSKAVNHIRSVWKDLLEDTETPIDTTIMAKNEVFCVQPEKGGRKPARLIVFPDLGVRVCEKMALYDVVSTLPQAVMGSSYGFQYSPGQRVEFLVNAWKAKKCPMGFAYDTRCFDSTVTENDIRVEESIYQCCDLAPEARQAIRSLTERLYIGGPLTNSKGQNCGYRRCRASGVLTTSCGNTLTCYLKAAAACRAAKLQDCTMLVCGDDLVVICESAGTQEDEASLRAFTEAMTRYSAPPGDPPKPEYDLELITSCSSNVSVAHDASGKRVYYLTRDPTTPLARAAWETARHTPVNSWLGNIIMYAPTVWARMILMTHFFSILLAQEQLEKTLDCQIYGACYSIEPLDLPQIIQRLHGLSAFSLHSYSPGEINRVISCLRKLGVPPLRVWRHRARSVRARLLSQGGRAATCGKYLFNWAVRTKLKLTPIPAASQLDLSSWFVAGYSGGDIYHSLSRARPRWFMWCLLLLSVGVGIYLLPNR

SEQ ID NO: 306 - protein, 591 aa, Artificial Sequence
  Synthetic peptide
SMSYTWTGALITPCAAEETKLPINALSNSLLRHHNLVYATTSRSASLRQKKVTFDRLQVLDDHYRDVLKEMKAKASTVKAKLLSVEEACKLTPPHSARSKFGYGAKDVRNLSSKAVNHIRSVWKDLLEDTETPIDTTIMAKNEVFCVQPEKGGRKPARLIVFPDLGVRVCEKMALYDVVSTLPQAVMGSSYGFQYSPGQRVEFLVNAWKAKKCPMGFAYDTRCFDSTVTENDIRVEESIYQCCDLAPEARQAIRSLTERLYIGGPLTNSKGQNCGYRRCRASGVLTTSCGNTLTCYLKAAAACRAAKLQDCTMLVCGDDLVVICESAGTQEDEASLRAFTEAMTRYSAPPGDPPKPEYDLELITSCSSNVSVAHDASGKRVYYLTRDPTTPLARAAWETARHTPVNSWLGNIIMYAPTVWARMILMTHFFSILLAQEQLEKTLDCQIYGACYSIEPLDLPQIIQRLHGLSAFSLHSYSPGEINRVTSCLRKLGVPPLRVWRHRARSVRARLLSQGGRAATCGKYLFNWAVRTKLKLTPIPAASQLDLSSWFVAGYSGGDIYHSLSRARPRWFMWCLLLLSVGVGIYLLPNR

SEQ ID NO: 307 - protein, 591 aa, Artificial Sequence
  Sythetic peptide
SMSYTWTGALITPCAAEETKLPINALSNSLLRHHNLVYATTSRSASLRQKKVTFDRLQVLDDHYRDVLKEMKAKASTVKAKLLSVEEACKLTPPHSARSKFGYGAKDVRNLSSKAVNHIRSVWKDLLEDTETPIDTTIMAKNEVFCVQPEKGGRKPARLIVFPDLGVRVCEKMALYDVVSTLPQAVMGSSYGFQYSPGQRVEFLVNAWKAKKCPMGFAYDTRCFDSTVTENDIRVEESIYQCCDLAPEARQAIRSLTERLYIGGPLTNSKGQNCGYRRCRASGVLTTSCGNTLTCYLKAAAACRAAKLQDCTMLVCGDDLVVICESAGTQEDEASLRAFTEAMTRYSAPPGDPPKPEYDLELITSCSSNVSVAHDASGKRVYYLTRDPTTPLARAAWETARHTPVNSWLGNIIMYAPTVWARMILMTHFFSILLAQEQLEKTLDCQIYGACYSIEPLDLPQIIQRLHGLSAFSLHSYSPGEINRVSSCLRKLGVPPLRVWRHRARSVRARLLSQGGRAATCGKYLFNWAVRTKLKLTPIPAASQLDLSSWFVAGYSGGDIYHSLSRARPRWFMWCLLLLSVGVGIYLLPNR

SEQ ID NO: 308 - protein, 591 aa, Artificial Sequence
  Synthetic peptide
SMSYTWTGALITPCAAEETKLPINALSNSLLRHHNLVYATTSRSASLRQKKVTFDRLQVLDDHYRDVLKEMKAKASTVKAKLLSVEEACKLTPPHSARSKFGYGAKDVRNLSSKAVNHIRSVWKDLLEDTETPIDTTIMAKNEVFCVQPEKGGRKPARLIVFPDLGVRVCEKMALYDVVSTLPQAVMGSSYGFQYSPGQRVEFLVNAWKAKKCPMGFAYDTRCFDSTVTENDIRVEESIYQCCDLAPEARQAIRSLTERLYIGGPLTNSKGQNCGYRRCRASGVLTTSCGNTLTCYLKAAAACRAAKLQDCTMLVCGDDLVVICESAGTQEDEASLRAFTEAMTRYSAPPGDPPKPEYDLELITSCSSNVSVAHDASGKRVYYLTRDPTTPLARAAWETARHTPVNSWLGNIIMYAPTVWARMILMTHFFSILLAQEQLEKTLDCQIYGACYSIEPLDLPQIIQRLHGLSAFSLHSYSPGEINRVASCLRKLGIPPLRVWRHRARSVRARLLSQGGRAATCGKYLFNWAVRTKLKLTPIPAASQLDLSSWFVAGYSGGDIYHSLSRARPRWFMWCLLLLSVGVGIYLLPNR

SEQ ID NO: 309 - protein, 591 aa, Artificial Sequence
  Synthetic peptide
SMSYTWTGALITPCAAEETKLPINALSNSLLRHHNLVYATTSRSASLRQKKVTFDRLQVLDDHYRDVLKEMKAKASTVKAKLLSVEEACKLTPPHSARSKFGYGAKDVRNLSSKAVNHIRSVWKDLLEDTETPIDTTIMAKNEVFCVQPEKGGRKPARLIVFPDLGVRVCEKMALYDVVSTLPQAVMGSSYGFQYSPGQRVEFLVNAWKAKKCPMGFAYDTRCFDSTVTENDIRVEESIYQCCDLAPEARQAIRSLTERLYIGGPLTNSKGQNCGYRRCRASGVLTTSCGNTLTCYLKAAAACRAAKLQDCTMLVCGDDLVVICESAGTQEDEASLRAFTEAMTRYSAPPGDPPKPEYDLELITSCSSNVSVAHDASGKRVYYLTRDPTTPLARAAWETARHTPVNSWLGNIIMYAPTVWARMILMTHFFSILLAQEQLEKTLDCQIYGACYSIEPLDLPQIIQRLHGLSAFSLHSYSPGEINRVVSCLRKLGIPPLRVWRHRARSVRARLLSQGGRAATCGKYLFNWAVRTKLKLTPIPAASQLDLSSWFVAGYSGGDIYHSLSRARPRWFMWCLLLLSVGVGIYLLPNR

SEQ ID NO: 310 - protein, 591 aa, Artificial Sequence
  Synthetic peptide
SMSYTWTGALITPCAAEETKLPINALSNSLLRHHNLVYATTSRSASLRQKKVTFDRLQVLDDHYRDVLKEMKAKASTVKAKLLSVEEACKLTPPHSARSKFGYGAKDVRNLSSKAVNHIRSVWKDLLEDTETPIDTTIMAKNEVFCVQPEKGGRKPARLIVFPDLGVRVCEKMALYDVVSTLPQAVMGSSYGFQYSPGQRVEFLVNAWKAKKCPMGFAYDTRCFDSTVTENDIRVEESIYQCCDLAPEARQAIRSLTERLYIGGPLTNSKGQNCGYRRCRASGVLTTSCGNTLTCYLKAAAACRAAKLQDCTMLVCGDDLVVICESAGTQEDEASLRAFTEAMTRYSAPPGDPPKPEYDLELITSCSSNVSVAHDASGKRVYYLTRDPTTPLARAAWETARHTPVNSWLGNIIMYAPTVWARMILMTHFFSILLAQEQLEKTLDCQIYGACYSIEPLDLPQIIQRLHGLSAFSLHSYSPGEINRVISCLRKLGIPPLRVWRHRARSVRARLLSQGGRAATCGKYLFNWAVRTKLKLTPIPAASQLDLSSWFVAGYSGGDIYHSLSRARPRWFMWCLLLLSVGVGIYLLPNR

SEQ ID NO: 311 - protein, 591 aa, Artificial Sequence
  Synthetic peptide
SMSYTWTGALITPCAAEETKLPINALSNSLLRHHNLVYATTSRSASLRQKKVTFDRLQVLDDHYRDVLKEMKAKASTVKAKLLSVEEACKLTPPHSARSKFGYGAKDVRNLSSKAVNHIRSVWKDLLEDTETPIDTTIMAKNEVFCVQPEKGGRKPARLIVFPDLGVRVCEKMALYDVVSTLPQAVMGSSYGFQYSPGQRVEFLVNAWKAKKCPMGFAYDTRCFDSTVTENDIRVEESIYQCCDLAPEARQAIRSLTERLYIGGPLTNSKGQNCGYRRCRASGVLTTSCGNTLTCYLKAAAACRAAKLQDCTMLVCGDDLVVICESAGTQEDEASLRAFTEAMTRYSAPPGDPPKPEYDLELITSCSSNVSVAHDASGKRVYYLTRDPTTPLARAAWETARHTPVNSWLGNIIMYAPTVWARMILMTHFFSILLAQEQLEKTLDCQIYGACYSIEPLDLPQIIQRLHGLSAFSLHSYSPGEINRVTSCLRKLGIPPLRVWRHRARSVRARLLSQGGRAATCGKYLFNWAVRTKLKLTPIPAASQLDLSSWFVAGYSGGDIYHSLSRARPRWFMWCLLLLSVGVGIYLLPNR

SEQ ID NO: 312 - protein, 591 aa, Artificial Sequence
  Synthetic peptid
SMSYTWTGALITPCAAEETKLPINALSNSLLRHHNLVYATTSRSASLRQKKVTFDRLQVLDDHYRDVLKEMKAKASTVKAKLLSVEEACKLTPPHSARSKFGYGAKDVRNLSSKAVNHIRSVWKDLLEDTETPIDTTIMAKNEVFCVQPEKGGRKPARLIVFPDLGVRVCEKMALYDVVSTLPQAVMGSSYGFQYSPGQRVEFLVNAWKAKKCPMGFAYDTRCFDSTVTENDIRVEESIYQCCDLAPEARQAIRSLTERLYIGGPLTNSKGQNCGYRRCRASGVLTTSCGNTLTCYLKAAAACRAAKLQDCTMLVCGDDLVVICESAGTQEDEASLRAFTEAMTRYSAPPGDPPKPEYDLELITSCSSNVSVAHDASGKRVYYLTRDPTTPLARAAWETARHTPVNSWLGNIIMYAPTVWARMILMTHFFSILLAQEQLEKTLDCQIYGACYSIEPLDLPQIIQRLHGLSAFSLHSYSPGEINRVSSCLRKLGIPPLRVWRHRARSVRARLLSQGGRAATCGKYLFNWAVRTKLKLTPIPAASQLDLSSWFVAGYSGGDIYHSLSRARPRWFMWCLLLLSVGVGIYLLPNR

SEQ ID NO: 313 - protein, 591 aa, Artificial Sequence
  Synthetic peptide
SMSYTWTGALITPCAAEETKLPINALSNSLLRHHNLVYATTSRSASLRQKKVTFDRLQVLDDHYRDVLKEMKAKASTVKAKLLSVEEACKLTPPHSARSKFGYGAKDVRNLSSKAVNHIRSVWKDLLEDTETPIDTTIMAKNEVFCVQPEKGGRKPARLIVFPDLGVRVCEKMALYDVVSTLPQAVMGSSYGFQYSPGQRVEFLVNAWKAKKCPMGFAYDTRCFDSTVTENDIRVEESIYQCCDLAPEARQAIRSLTERLYIGGPLTNSKGQNCGYRRCRASGVLTTSCGNTLTCYLKAAAACRAAKLQDCTMLVCGDDLVVICESAGTQEDEASLRAFTEAMTRYSAPPGDPPKPEYDLELITSCSSNVSVAHDASGKRVYYLTRDPTTPLARAAWETARHTPVNSWLGNIIMYAPTVWARAILMTHFFSILLAQEQLEKTLDCQIYGACYSIEPLDLPQIIQRLHGLSAFSLHSYSPGEINRVASCLRKLGVPPLRVWRHRARSVRARLLSQGGRAATCGKYLFNWAVRTKLKLTPIPAASQLDLSSWFVAGYSGGDIYHSLSRARPRWFMWCLLLLSVGVGIYLLPNR

SEQ ID NO: 314 - protein, 591 aa, Artificial Sequence
  Synthetic peptide
SMSYTWTGALITPCAAEETKLPINALSNSLLRHHNLVYATTSRSASLRQKKVTFDRLQVLDDHYRDVLKEMKAKASTVKAKLLSVEEACKLTPPHSARSKFGYGAKDVRNLSSKAVNHIRSVWKDLLEDTETPIDTTIMAKNEVFCVQPEKGGRKPARLIVFPDLGVRVCEKMALYDVVSTLPQAVMGSSYGFQYSPGQRVEFLVNAWKAKKCPMGFAYDTRCFDSTVTENDIRVEESIYQCCDLAPEARQAIRSLTERLYIGGPLTNSKGQNCGYRRCRASGVLTTSCGNTLTCYLKAAAACRAAKLQDCTMLVCGDDLVVICESAGTQEDEASLRAFTEAMTRYSAPPGDPPKPEYDLELITSCSSNVSVAHDASGKRVYYLTRDPTTPLARAAWETARHTPVNSWLGNIIMYAPTVWARAILMTHFFSILLAQEQLEKTLDCQIYGACYSIEPLDLPQIIQRLHGLSAFSLHSYSPGEINRVVSCLRKLGVPPLRVWRHRARSVRARLLSQGGRAATCGKYLFNWAVRTKLKLTPIPAASQLDLSSWFVAGYSGGDIYHSLSRARPRWFMWCLLLLSVGVGIYLLPNR

SEQ ID NO: 315 - protein, 591 aa, Artificial Sequence
  Synthetic peptide
SMSYTWTGALITPCAAEETKLPINALSNSLLRHHNLVYATTSRSASLRQKKVTFDRLQVLDDHYRDVLKEMKAKASTVKAKLLSVEEACKLTPPHSARSKFGYGAKDVRNLSSKAVNHIRSVWKDLLEDTETPIDTTIMAKNEVFCVQPEKGGRKPARLIVFPDLGVRVCEKMALYDVVSTLPQAVMGSSYGFQYSPGQRVEFLVNAWKAKKCPMGFAYDTRCFDSTVTENDIRVEESIYQCCDLAPEARQAIRSLTERLYIGGPLTNSKGQNCGYRRCRASGVLTTSCGNTLTCYLKAAAACRAAKLQDCTMLVCGDDLVVICESAGTQEDEASLRAFTEAMTRYSAPPGDPPKPEYDLELITSCSSNVSVAHDASGKRVYYLTRDPTTPLARAAWETARHTPVNSWLGNIIMYAPTVWARAILMTHFFSILLAQEQLEKTLDCQIYGACYSIEPLDLPQIIQRLHGLSAFSLHSYSPGEINRVISCLRKLGVPPLRVWRHRARSVRARLLSQGGRAATCGKYLFNWAVRTKLKLTPIPAASQLDLSSWFVAGYSGGDIYHSLSRARPRWFMWCLLLLSVGVGIYLLPNR

SEQ ID NO: 316 - protein, 591 aa, Artificial Sequence
  Synthetic peptide
SMSYTWTGALITPCAAEETKLPINALSNSLLRHHNLVYATTSRSASLRQKKVTFDRLQVLDDHYRDVLKEMKAKASTVKAKLLSVEEACKLTPPHSARSKFGYGAKDVRNLSSKAVNHIRSVWKDLLEDTETPIDTTIMAKNEVFCVQPEKGGRKPARLIVFPDLGVRVCEKMALYDVVSTLPQAVMGSSYGFQYSPGQRVEFLVNAWKAKKCPMGFAYDTRCFDSTVTENDIRVEESIYQCCDLAPEARQAIRSLTERLYIGGPLTNSKGQNCGYRRCRASGVLTTSCGNTLTCYLKAAAACRAAKLQDCTMLVCGDDLVVICESAGTQEDEASLRAFTEAMTRYSAPPGDPPKPEYDLELITSCSSNVSVAHDASGKRVYYLTRDPTTPLARAAWETARHTPVNSWLGNIIMYAPTVWARAILMTHFFSILLAQEQLEKTLDCQIYGACYSIEPLDLPQIIQRLHGLSAFSLHSYSPGEINRVTSCLRKLGVPPLRVWRHRARSVRARLLSQGGRAATCGKYLFNWAVRTKLKLTPIPAASQLDLSSWFVAGYSGGDIYHSLSRARPRWFMWCLLLLSVGVGIYLLPNR

SEQ ID NO: 317 - protein, 591 aa, Artificial Sequence
  Synthetic peptide
SMSYTWTGALITPCAAEETKLPINALSNSLLRHHNLVYATTSRSASLRQKKVTFDRLQVLDDHYRDVLKEMKAKASTVKAKLLSVEEACKLTPPHSARSKFGYGAKDVRNLSSKAVNHIRSVWKDLLEDTETPIDTTIMAKNEVFCVQPEKGGRKPARLIVFPDLGVRVCEKMALYDVVSTLPQAVMGSSYGFQYSPGQRVEFLVNAWKAKKCPMGFAYDTRCFDSTVTENDIRVEESIYQCCDLAPEARQAIRSLTERLYIGGPLTNSKGQNCGYRRCRASGVLTTSCGNTLTCYLKAAAACRAAKLQDCTMLVCGDDLVVICESAGTQEDEASLRAFTEAMTRYSAPPGDPPKPEYDLELITSCSSNVSVAHDASGKRVYYLTRDPTTPLARAAWETARHTPVNSWLGNIIMYAPTVWARAILMTHFFSILLAQEQLEKTLDCQIYGACYSIEPLDLPQIIQRLHGLSAFSLHSYSPGEINRVSSCLRKLGVPPLRVWRHRARSVRARLLSQGGRAATCGKYLFNWAVRTKLKLTPIPAASQLDLSSWFVAGYSGGDIYHSLSRARPRWFMWCLLLLSVGVGIYLLPNR

SEQ ID NO: 318 - protein, 591 aa, Artificial Sequence
  Synthetic peptide
SMSYTWTGALITPCAAEETKLPINALSNSLLRHHNLVYATTSRSASLRQKKVTFDRLQVLDDHYRDVLKEMKAKASTVKAKLLSVEEACKLTPPHSARSKFGYGAKDVRNLSSKAVNHIRSVWKDLLEDTETPIDTTIMAKNEVFCVQPEKGGRKPARLIVFPDLGVRVCEKMALYDVVSTLPQAVMGSSYGFQYSPGQRVEFLVNAWKAKKCPMGFAYDTRCFDSTVTENDIRVEESIYQCCDLAPEARQAIRSLTERLYIGGPLTNSKGQNCGYRRCRASGVLTTSCGNTLTCYLKAAAACRAAKLQDCTMLVCGDDLVVICESAGTQEDEASLRAFTEAMTRYSAPPGDPPKPEYDLELITSCSSNVSVAHDASGKRVYYLTRDPTTPLARAAWETARHTPVNSWLGNIIMYAPTVWARAILMTHFFSILLAQEQLEKTLDCQIYGACYSIEPLDLPQIIQRLHGLSAFSLHSYSPGEINRVASCLRKLGIPPLRVWRHRARSVRARLLSQGGRAATCGKYLFNWAVRTKLKLTPIPAASQLDLSSWFVAGYSGGDIYHSLSRARPRWFMWCLLLLSVGVGIYLLPNR

SEQ ID NO: 319 - protein, 591 aa, Artificial Sequence
  Synthetic peptide
SMSYTWTGALITPCAAEETKLPINALSNSLLRHHNLVYATTSRSASLRQKKVTFDRLQVLDDHYRDVLKEMKAKASTVKAKLLSVEEACKLTPPHSARSKFGYGAKDVRNLSSKAVNHIRSVWKDLLEDTETPIDTTIMAKNEVFCVQPEKGGRKPARLIVFPDLGVRVCEKMALYDVVSTLPQAVMGSSYGFQYSPGQRVEFLVNAWKAKKCPMGFAYDTRCFDSTVTENDIRVEESIYQCCDLAPEARQAIRSLTERLYIGGPLTNSKGQNCGYRRCRASGVLTTSCGNTLTCYLKAAAACRAAKLQDCTMLVCGDDLVVICESAGTQEDEASLRAFTEAMTRYSAPPGDPPKPEYDLELITSCSSNVSVAHDASGKRVYYLTRDPTTPLARAAWETARHTPVNSWLGNIIMYAPTVWARAILMTHFFSILLAQEQLEKTLDCQIYGACYSIEPLDLPQIIQRLHGLSAFSLHSYSPGEINRVVSCLRKLGIPPLRVWRHRARSVRARLLSQGGRAATCGKYLFNWAVRTKLKLTPIPAASQLDLSSWFVAGYSGGDIYHSLSRARPRWFMWCLLLLSVGVGIYLLPNR

SEQ ID NO: 320 - protein, 591 aa, Artificial Sequence
  Synthetic peptide
SMSYTWTGALITPCAAEETKLPINALSNSLLRHHNLVYATTSRSASLRQKKVTFDRLQVLDDHYRDVLKEMKAKASTVKAKLLSVEEACKLTPPHSARSKFGYGAKDVRNLSSKAVNHIRSVWKDLLEDTETPIDTTIMAKNEVFCVQPEKGGRKPARLIVFPDLGVRVCEKMALYDVVSTLPQAVMGSSYGFQYSPGQRVEFLVNAWKAKKCPMGFAYDTRCFDSTVTENDIRVEESIYQCCDLAPEARQAIRSLTERLYIGGPLTNSKGQNCGYRRCRASGVLTTSCGNTLTCYLKAAAACRAAKLQDCTMLVCGDDLVVICESAGTQEDEASLRAFTEAMTRYSAPPGDPPKPEYDLELITSCSSNVSVAHDASGKRVYYLTRDPTTPLARAAWETARHTPVNSWLGNIIMYAPTVWARAILMTHFFSILLAQEQLEKTLDCQIYGACYSIEPLDLPQIIQRLHGLSAFSLHSYSPGEINRVISCLRKLGIPPLRVWRHRARSVRARLLSQGGRAATCGKYLFNWAVRTKLKLTPIPAASQLDLSSWFVAGYSGGDIYHSLSRARPRWFMWCLLLLSVGVGIYLLPNR

SEQ ID NO: 321 - protein, 591 aa, Artificial Sequence
  Synthetic peptide
SMSYTWTGALITPCAAEETKLPINALSNSLLRHHNLVYATTSRSASLRQKKVTFDRLQVLDDHYRDVLKEMKAKASTVKAKLLSVEEACKLTPPHSARSKFGYGAKDVRNLSSKAVNHIRSVWKDLLEDTETPIDTTIMAKNEVFCVQPEKGGRKPARLIVFPDLGVRVCEKMALYDVVSTLPQAVMGSSYGFQYSPGQRVEFLVNAWKAKKCPMGFAYDTRCFDSTVTENDIRVEESIYQCCDLAPEARQAIRSLTERLYIGGPLTNSKGQNCGYRRCRASGVLTTSCGNTLTCYLKAAAACRAAKLQDCTMLVCGDDLVVICESAGTQEDEASLRAFTEAMTRYSAPPGDPPKPEYDLELITSCSSNVSVAHDASGKRVYYLTRDPTTPLARAAWETARHTPVNSWLGNIIMYAPTVWARAILMTHFFSILLAQEQLEKTLDCQIYGACYSIEPLDLPQIIQRLHGLSAFSLHSYSPGEINRVTSCLRKLGIPPLRVWRHRARSVRARLLSQGGRAATCGKYLFNWAVRTKLKLTPIPAASQLDLSSWFVAGYSGGDIYHSLSRARPRWFMWCLLLLSVGVGIYLLPNR

SEQ ID NO: 322 - protein, 591 aa, Artificial Sequence
  Synthetic peptide
SMSYTWTGALITPCAAEETKLPINALSNSLLRHHNLVYATTSRSASLRQKKVTFDRLQVLDDHYRDVLKEMKAKASTVKAKLLSVEEACKLTPPHSARSKFGYGAKDVRNLSSKAVNHIRSVWKDLLEDTETPIDTTIMAKNEVFCVQPEKGGRKPARLIVFPDLGVRVCEKMALYDVVSTLPQAVMGSSYGFQYSPGQRVEFLVNAWKAKKCPMGFAYDTRCFDSTVTENDIRVEESIYQCCDLAPEARQAIRSLTERLYIGGPLTNSKGQNCGYRRCRASGVLTTSCGNTLTCYLKAAAACRAAKLQDCTMLVCGDDLVVICESAGTQEDEASLRAFTEAMTRYSAPPGDPPKPEYDLELITSCSSNVSVAHDASGKRVYYLTRDPTTPLARAAWETARHTPVNSWLGNIIMYAPTVWARAILMTHFFSILLAQEQLEKTLDCQIYGACYSIEPLDLPQIIQRLHGLSAFSLHSYSPGEINRVSSCLRKLGIPPLRVWRHRARSVRARLLSQGGRAATCGKYLFNWAVRTKLKLTPIPAASQLDLSSWFVAGYSGGDIYHSLSRARPRWFMWCLLLLSVGVGIYLLPNR

SEQ ID NO: 323 - protein, 591 aa, Artificial Sequence
  Synthetic peptide
SMSYTWTGALITPCAAEETKLPINALSNSLLRHHNLVYATTSRSASLRQKKVTFDRLQVLDDHYRDVLKEMKAKASTVKAKLLSVEEACKLTPPHSARSKFGYGAKDVRNLSSKAVNHIRSVWKDLLEDTETPIDTTIMAKNEVFCVQPEKGGRKPARLIVFPDLGVRVCEKMALYDVVSTLPQAVMGSSYGFQYSPGQRVEFLVNAWKAKKCPMGFAYDTRCFDSTVTENDIRVEESIYQCCDLAPEARQAIRSLTERLYIGGPLTNSKGQNCGYRRCRASGVLTTSCGNTLTCYLKAAAACRAAKLQDCTMLVCGDDLVVICESAGTQEDEASLRAFTEAMTRYSAPPGDPPKPEYDLELITSCSSNVSVAHDASGKRVYYLTRDPTTPLARAAWETARHTPVNSWLGNIIMYAPTVWARMILMTHFFSILLAQEQLEKTLDCQIYGACYSIEPLDLPQIIQRLHGLSAFSLHSYSPGEANRVASCLRKLGVPPLRVWRHRARSVRARLLSQGGRAATCGKYLFNWAVRTKLKLTPIPAASQLDLSSWFVAGYSGGDIYHSLSRARPRWFMWCLLLLSVGVGIYLLPNR

SEQ ID NO: 324 - protein, 591 aa, Artificial Sequence
  Synthetic peptide
SMSYTWTGALITPCAAEETKLPINALSNSLLRHHNLVYATTSRSASLRQKKVTFDRLQVLDDHYRDVLKEMKAKASTVKAKLLSVEEACKLTPPHSARSKFGYGAKDVRNLSSKAVNHIRSVWKDLLEDTETPIDTTIMAKNEVFCVQPEKGGRKPARLIVFPDLGVRVCEKMALYDVVSTLPQAVMGSSYGFQYSPGQRVEFLVNAWKAKKCPMGFAYDTRCFDSTVTENDIRVEESIYQCCDLAPEARQAIRSLTERLYIGGPLTNSKGQNCGYRRCRASGVLTTSCGNTLTCYLKAAAACRAAKLQDCTMLVCGDDLVVICESAGTQEDEASLRAFTEAMTRYSAPPGDPPKPEYDLELITSCSSNVSVAHDASGKRVYYLTRDPTTPLARAAWETARHTPVNSWLGNIIMYAPTVWARMILMTHFFSILLAQEQLEKTLDCQIYGACYSIEPLDLPQIIQRLHGLSAFSLHSYSPGEANRVVSCLRKLGVPPLRVWRHRARSVRARLLSQGGRAATCGKYLFNWAVRTKLKLTPIPAASQLDLSSWFVAGYSGGDIYHSLSRARPRWFMWCLLLLSVGVGIYLLPNR

SEQ ID NO: 325 - protein, 591 aa, Artificial Sequence
  Synthetic peptide
SMSYTWTGALITPCAAEETKLPINALSNSLLRHHNLVYATTSRSASLRQKKVTFDRLQVLDDHYRDVLKEMKAKASTVKAKLLSVEEACKLTPPHSARSKFGYGAKDVRNLSSKAVNHIRSVWKDLLEDTETPIDTTIMAKNEVFCVQPEKGGRKPARLIVFPDLGVRVCEKMALYDVVSTLPQAVMGSSYGFQYSPGQRVEFLVNAWKAKKCPMGFAYDTRCFDSTVTENDIRVEESIYQCCDLAPEARQAIRSLTERLYIGGPLTNSKGQNCGYRRCRASGVLTTSCGNTLTCYLKAAAACRAAKLQDCTMLVCGDDLVVICESAGTQEDEASLRAFTEAMTRYSAPPGDPPKPEYDLELITSCSSNVSVAHDASGKRVYYLTRDPTTPLARAAWETARHTPVNSWLGNIIMYAPTVWARMILMTHFFSILLAQEQLEKTLDCQIYGACYSIEPLDLPQIIQRLHGLSAFSLHSYSPGEANRVISCLRKLGVPPLRVWRHRARSVRARLLSQGGRAATCGKYLFNWAVRTKLKLTPIPAASQLDLSSWFVAGYSGGDIYHSLSRARPRWFMWCLLLLSVGVGIYLLPNR

SEQ ID NO: 326 - protein, 591 aa, Artificial Sequence
  Synthetic peptide
SMSYTWTGALITPCAAEETKLPINALSNSLLRHHNLVYATTSRSASLRQKKVTFDRLQVLDDHYRDVLKEMKAKASTVKAKLLSVEEACKLTPPHSARSKFGYGAKDVRNLSSKAVNHIRSVWKDLLEDTETPIDTTIMAKNEVFCVQPEKGGRKPARLIVFPDLGVRVCEKMALYDVVSTLPQAVMGSSYGFQYSPGQRVEFLVNAWKAKKCPMGFAYDTRCFDSTVTENDIRVEESIYQCCDLAPEARQAIRSLTERLYIGGPLTNSKGQNCGYRRCRASGVLTTSCGNTLTCYLKAAAACRAAKLQDCTMLVCGDDLVVICESAGTQEDEASLRAFTEAMTRYSAPPGDPPKPEYDLELITSCSSNVSVAHDASGKRVYYLTRDPTTPLARAAWETARHTPVNSWLGNIIMYAPTVWARMILMTHFFSILLAQEQLEKTLDCQIYGACYSIEPLDLPQIIQRLHGLSAFSLHSYSPGEANRVTSCLRKLGVPPLRVWRHRARSVRARLLSQGGRAATCGKYLFNWAVRTKLKLTPIPAASQLDLSSWFVAGYSGGDIYHSLSRARPRWFMWCLLLLSVGVGIYLLPNR

SEQ ID NO: 327 - protein, 591 aa, Artificial Sequence
  Synthetic peptide
SMSYTWTGALITPCAAEETKLPINALSNSLLRHHNLVYATTSRSASLRQKKVTFDRLQVLDDHYRDVLKEMKAKASTVKAKLLSVEEACKLTPPHSARSKFGYGAKDVRNLSSKAVNHIRSVWKDLLEDTETPIDTTIMAKNEVFCVQPEKGGRKPARLIVFPDLGVRVCEKMALYDVVSTLPQAVMGSSYGFQYSPGQRVEFLVNAWKAKKCPMGFAYDTRCFDSTVTENDIRVEESIYQCCDLAPEARQAIRSLTERLYIGGPLTNSKGQNCGYRRCRASGVLTTSCGNTLTCYLKAAAACRAAKLQDCTMLVCGDDLVVICESAGTQEDEASLRAFTEAMTRYSAPPGDPPKPEYDLELITSCSSNVSVAHDASGKRVYYLTRDPTTPLARAAWETARHTPVNSWLGNIIMYAPTVWARMILMTHFFSILLAQEQLEKTLDCQIYGACYSIEPLDLPQIIQRLHGLSAFSLHSYSPGEANRVSSCLRKLGVPPLRVWRHRARSVRARLLSQGGRAATCGKYLFNWAVRTKLKLTPIPAASQLDLSSWFVAGYSGGDIYHSLSRARPRWFMWCLLLLSVGVGIYLLPNR

SEQ ID NO: 328 - protein, 591 aa, Artificial Sequence
  Synthetic peptide
SMSYTWTGALITPCAAEETKLPINALSNSLLRHHNLVYATTSRSASLRQKKVTFDRLQVLDDHYRDVLKEMKAKASTVKAKLLSVEEACKLTPPHSARSKFGYGAKDVRNLSSKAVNHIRSVWKDLLEDTETPIDTTIMAKNEVFCVQPEKGGRKPARLIVFPDLGVRVCEKMALYDVVSTLPQAVMGSSYGFQYSPGQRVEFLVNAWKAKKCPMGFAYDTRCFDSTVTENDIRVEESIYQCCDLAPEARQAIRSLTERLYIGGPLTNSKGQNCGYRRCRASGVLTTSCGNTLTCYLKAAAACRAAKLQDCTMLVCGDDLVVICESAGTQEDEASLRAFTEAMTRYSAPPGDPPKPEYDLELITSCSSNVSVAHDASGKRVYYLTRDPTTPLARAAWETARHTPVNSWLGNIIMYAPTVWARMILMTHFFSILLAQEQLEKTLDCQIYGACYSIEPLDLPQIIQRLHGLSAFSLHSYSPGEANRVASCLRKLGIPPLRVWRHRARSVRARLLSQGGRAATCGKYLFNWAVRTKLKLTPIPAASQLDLSSWFVAGYSGGDIYHSLSRARPRWFMWCLLLLSVGVGIYLLPNR

SEQ ID NO: 329 - protein, 591 aa, Artificial Sequence
  Synthetic peptide
SMSYTWTGALITPCAAEETKLPINALSNSLLRHHNLVYATTSRSASLRQKKVTFDRLQVLDDHYRDVLKEMKAKASTVKAKLLSVEEACKLTPPHSARSKFGYGAKDVRNLSSKAVNHIRSVWKDLLEDTETPIDTTIMAKNEVFCVQPEKGGRKPARLIVFPDLGVRVCEKMALYDVVSTLPQAVMGSSYGFQYSPGQRVEFLVNAWKAKKCPMGFAYDTRCFDSTVTENDIRVEESIYQCCDLAPEARQAIRSLTERLYIGGPLTNSKGQNCGYRRCRASGVLTTSCGNTLTCYLKAAAACRAAKLQDCTMLVCGDDLVVICESAGTQEDEASLRAFTEAMTRYSAPPGDPPKPEYDLELITSCSSNVSVAHDASGKRVYYLTRDPTTPLARAAWETARHTPVNSWLGNIIMYAPTVWARMILMTHFFSILLAQEQLEKTLDCQIYGACYSIEPLDLPQIIQRLHGLSAFSLHSYSPGEANRVVSCLRKLGIPPLRVWRHRARSVRARLLSQGGRAATCGKYLFNWAVRTKLKLTPIPAASQLDLSSWFVAGYSGGDIYHSLSRARPRWFMWCLLLLSVGVGIYLLPNR

SEQ ID NO: 330 - protein, 591 aa, Artificial Sequence
  Synthetic peptide
SMSYTWTGALITPCAAEETKLPINALSNSLLRHHNLVYATTSRSASLRQKKVTFDRLQVLDDHYRDVLKEMKAKASTVKAKLLSVEEACKLTPPHSARSKFGYGAKDVRNLSSKAVNHIRSVWKDLLEDTETPIDTTIMAKNEVFCVQPEKGGRKPARLIVFPDLGVRVCEKMALYDVVSTLPQAVMGSSYGFQYSPGQRVEFLVNAWKAKKCPMGFAYDTRCFDSTVTENDIRVEESIYQCCDLAPEARQAIRSLTERLYIGGPLTNSKGQNCGYRRCRASGVLTTSCGNTLTCYLKAAAACRAAKLQDCTMLVCGDDLVVICESAGTQEDEASLRAFTEAMTRYSAPPGDPPKPEYDLELITSCSSNVSVAHDASGKRVYYLTRDPTTPLARAAWETARHTPVNSWLGNIIMYAPTVWARMILMTHFFSILLAQEQLEKTLDCQIYGACYSIEPLDLPQIIQRLHGLSAFSLHSYSPGEANRVISCLRKLGIPPLRVWRHRARSVRARLLSQGGRAATCGKYLFNWAVRTKLKLTPIPAASQLDLSSWFVAGYSGGDIYHSLSRARPRWFMWCLLLLSVGVGIYLLPNR

SEQ ID NO: 331 - protein, 591 aa, Artificial Sequence
  Synthetic peptide
SMSYTWTGALITPCAAEETKLPINALSNSLLRHHNLVYATTSRSASLRQKKVTFDRLQVLDDHYRDVLKEMKAKASTVKAKLLSVEEACKLTPPHSARSKFGYGAKDVRNLSSKAVNHIRSVWKDLLEDTETPIDTTIMAKNEVFCVQPEKGGRKPARLIVFPDLGVRVCEKMALYDVVSTLPQAVMGSSYGFQYSPGQRVEFLVNAWKAKKCPMGFAYDTRCFDSTVTENDIRVEESIYQCCDLAPEARQAIRSLTERLYIGGPLTNSKGQNCGYRRCRASGVLTTSCGNTLTCYLKAAAACRAAKLQDCTMLVCGDDLVVICESAGTQEDEASLRAFTEAMTRYSAPPGDPPKPEYDLELITSCSSNVSVAHDASGKRVYYLTRDPTTPLARAAWETARHTPVNSWLGNIIMYAPTVWARMILMTHFFSILLAQEQLEKTLDCQIYGACYSIEPLDLPQIIQRLHGLSAFSLHSYSPGEANRVTSCLRKLGIPPLRVWRHRARSVRARLLSQGGRAATCGKYLFNWAVRTKLKLTPIPAASQLDLSSWFVAGYSGGDIYHSLSRARPRWFMWCLLLLSVGVGIYLLPNR

SEQ ID NO: 332 - protein, 591 aa, Artificial Sequence
  Synthetic peptide
SMSYTWTGALITPCAAEETKLPINALSNSLLRHHNLVYATTSRSASLRQKKVTFDRLQVLDDHYRDVLKEMKAKASTVKAKLLSVEEACKLTPPHSARSKFGYGAKDVRNLSSKAVNHIRSVWKDLLEDTETPIDTTIMAKNEVFCVQPEKGGRKPARLIVFPDLGVRVCEKMALYDVVSTLPQAVMGSSYGFQYSPGQRVEFLVNAWKAKKCPMGFAYDTRCFDSTVTENDIRVEESIYQCCDLAPEARQAIRSLTERLYIGGPLTNSKGQNCGYRRCRASGVLTTSCGNTLTCYLKAAAACRAAKLQDCTMLVCGDDLVVICESAGTQEDEASLRAFTEAMTRYSAPPGDPPKPEYDLELITSCSSNVSVAHDASGKRVYYLTRDPTTPLARAAWETARHTPVNSWLGNIIMYAPTVWARMILMTHFFSILLAQEQLEKTLDCQIYGACYSIEPLDLPQIIQRLHGLSAFSLHSYSPGEANRVSSCLRKLGIPPLRVWRHRARSVRARLLSQGGRAATCGKYLFNWAVRTKLKLTPIPAASQLDLSSWFVAGYSGGDIYHSLSRARPRWFMWCLLLLSVGVGIYLLPNR

SEQ ID NO: 333 - protein, 591 aa, Artificial Sequence
  Synthetic peptide
SMSYTWTGALITPCAAEETKLPINALSNSLLRHHNLVYATTSRSASLRQKKVTFDRLQVLDDHYRDVLKEMKAKASTVKAKLLSVEEACKLTPPHSARSKFGYGAKDVRNLSSKAVNHIRSVWKDLLEDTETPIDTTIMAKNEVFCVQPEKGGRKPARLIVFPDLGVRVCEKMALYDVVSTLPQAVMGSSYGFQYSPGQRVEFLVNAWKAKKCPMGFAYDTRCFDSTVTENDIRVEESIYQCCDLAPEARQAIRSLTERLYIGGPLTNSKGQNCGYRRCRASGVLTTSCGNTLTCYLKAAAACRAAKLQDCTMLVCGDDLVVICESAGTQEDEASLRAFTEAMTRYSAPPGDPPKPEYDLELITSCSSNVSVAHDASGKRVYYLTRDPTTPLARAAWETARHTPVNSWLGNIIMYAPTVWARAILMTHFFSILLAQEQLEKTLDCQIYGACYSIEPLDLPQIIQRLHGLSAFSLHSYSPGEANRVASCLRKLGVPPLRVWRHRARSVRARLLSQGGRAATCGKYLFNWAVRTKLKLTPIPAASQLDLSSWFVAGYSGGDIYHSLSRARPRWFMWCLLLLSVGVGIYLLPNR

SEQ ID NO: 334 - protein, 591 aa, Artificial Sequence
  Synthetic peptide
SMSYTWTGALITPCAAEETKLPINALSNSLLRHHNLVYATTSRSASLRQKKVTFDRLQVLDDHYRDVLKEMKAKASTVKAKLLSVEEACKLTPPHSARSKFGYGAKDVRNLSSKAVNHIRSVWKDLLEDTETPIDTTIMAKNEVFCVQPEKGGRKPARLIVFPDLGVRVCEKMALYDVVSTLPQAVMGSSYGFQYSPGQRVEFLVNAWKAKKCPMGFAYDTRCFDSTVTENDIRVEESIYQCCDLAPEARQAIRSLTERLYIGGPLTNSKGQNCGYRRCRASGVLTTSCGNTLTCYLKAAAACRAAKLQDCTMLVCGDDLVVICESAGTQEDEASLRAFTEAMTRYSAPPGDPPKPEYDLELITSCSSNVSVAHDASGKRVYYLTRDPTTPLARAAWETARHTPVNSWLGNIIMYAPTVWARAILMTHFFSILLAQEQLEKTLDCQIYGACYSIEPLDLPQIIQRLHGLSAFSLHSYSPGEANRVVSCLRKLGVPPLRVWRHRARSVRARLLSQGGRAATCGKYLFNWAVRTKLKLTPIPAASQLDLSSWFVAGYSGGDIYHSLSRARPRWFMWCLLLLSVGVGIYLLPNR

SEQ ID NO: 335 - protein, 591 aa, Artificial Sequence
  Synthetic peptide
SMSYTWTGALITPCAAEETKLPINALSNSLLRHHNLVYATTSRSASLRQKKVTFDRLQVLDDHYRDVLKEMKAKASTVKAKLLSVEEACKLTPPHSARSKFGYGAKDVRNLSSKAVNHIRSVWKDLLEDTETPIDTTIMAKNEVFCVQPEKGGRKPARLIVFPDLGVRVCEKMALYDVVSTLPQAVMGSSYGFQYSPGQRVEFLVNAWKAKKCPMGFAYDTRCFDSTVTENDIRVEESIYQCCDLAPEARQAIRSLTERLYIGGPLTNSKGQNCGYRRCRASGVLTTSCGNTLTCYLKAAAACRAAKLQDCTMLVCGDDLVVICESAGTQEDEASLRAFTEAMTRYSAPPGDPPKPEYDLELITSCSSNVSVAHDASGKRVYYLTRDPTTPLARAAWETARHTPVNSWLGNIIMYAPTVWARAILMTHFFSILLAQEQLEKTLDCQIYGACYSIEPLDLPQIIQRLHGLSAFSLHSYSPGEANRVISCLRKLGVPPLRVWRHRARSVRARLLSQGGRAATCGKYLFNWAVRTKLKLTPIPAASQLDLSSWFVAGYSGGDIYHSLSRARPRWFMWCLLLLSVGVGIYLLPNR

SEQ ID NO: 336 - protein, 591 aa, Artificial Sequence
  Sythetic peptide
SMSYTWTGALITPCAAEETKLPINALSNSLLRHHNLVYATTSRSASLRQKKVTFDRLQVLDDHYRDVLKEMKAKASTVKAKLLSVEEACKLTPPHSARSKFGYGAKDVRNLSSKAVNHIRSVWKDLLEDTETPIDTTIMAKNEVFCVQPEKGGRKPARLIVFPDLGVRVCEKMALYDVVSTLPQAVMGSSYGFQYSPGQRVEFLVNAWKAKKCPMGFAYDTRCFDSTVTENDIRVEESIYQCCDLAPEARQAIRSLTERLYIGGPLTNSKGQNCGYRRCRASGVLTTSCGNTLTCYLKAAAACRAAKLQDCTMLVCGDDLVVICESAGTQEDEASLRAFTEAMTRYSAPPGDPPKPEYDLELITSCSSNVSVAHDASGKRVYYLTRDPTTPLARAAWETARHTPVNSWLGNIIMYAPTVWARAILMTHFFSILLAQEQLEKTLDCQIYGACYSIEPLDLPQIIQRLHGLSAFSLHSYSPGEANRVTSCLRKLGVPPLRVWRHRARSVRARLLSQGGRAATCGKYLFNWAVRTKLKLTPIPAASQLDLSSWFVAGYSGGDIYHSLSRARPRWFMWCLLLLSVGVGIYLLPNR

SEQ ID NO: 337 - protein, 591 aa, Artificial Sequence
  Synthetic peptide
SMSYTWTGALITPCAAEETKLPINALSNSLLRHHNLVYATTSRSASLRQKKVTFDRLQVLDDHYRDVLKEMKAKASTVKAKLLSVEEACKLTPPHSARSKFGYGAKDVRNLSSKAVNHIRSVWKDLLEDTETPIDTTIMAKNEVFCVQPEKGGRKPARLIVFPDLGVRVCEKMALYDVVSTLPQAVMGSSYGFQYSPGQRVEFLVNAWKAKKCPMGFAYDTRCFDSTVTENDIRVEESIYQCCDLAPEARQAIRSLTERLYIGGPLTNSKGQNCGYRRCRASGVLTTSCGNTLTCYLKAAAACRAAKLQDCTMLVCGDDLVVICESAGTQEDEASLRAFTEAMTRYSAPPGDPPKPEYDLELITSCSSNVSVAHDASGKRVYYLTRDPTTPLARAAWETARHTPVNSWLGNIIMYAPTVWARAILMTHFFSILLAQEQLEKTLDCQIYGACYSIEPLDLPQIIQRLHGLSAFSLHSYSPGEANRVSSCLRKLGVPPLRVWRHRARSVRARLLSQGGRAATCGKYLFNWAVRTKLKLTPIPAASQLDLSSWFVAGYSGGDIYHSLSRARPRWFMWCLLLLSVGVGIYLLPNR

SEQ ID NO: 338 - protein, 591 aa, Artificial Sequence
  Synthetic peptide
SMSYTWTGALITPCAAEETKLPINALSNSLLRHHNLVYATTSRSASLRQKKVTFDRLQVLDDHYRDVLKEMKAKASTVKAKLLSVEEACKLTPPHSARSKFGYGAKDVRNLSSKAVNHIRSVWKDLLEDTETPIDTTIMAKNEVFCVQPEKGGRKPARLIVFPDLGVRVCEKMALYDVVSTLPQAVMGSSYGFQYSPGQRVEFLVNAWKAKKCPMGFAYDTRCFDSTVTENDIRVEESIYQCCDLAPEARQAIRSLTERLYIGGPLTNSKGQNCGYRRCRASGVLTTSCGNTLTCYLKAAAACRAAKLQDCTMLVCGDDLVVICESAGTQEDEASLRAFTEAMTRYSAPPGDPPKPEYDLELITSCSSNVSVAHDASGKRVYYLTRDPTTPLARAAWETARHTPVNSWLGNIIMYAPTVWARAILMTHFFSILLAQEQLEKTLDCQIYGACYSIEPLDLPQIIQRLHGLSAFSLHSYSPGEANRVASCLRKLGIPPLRVWRHRARSVRARLLSQGGRAATCGKYLFNWAVRTKLKLTPIPAASQLDLSSWFVAGYSGGDIYHSLSRARPRWFMWCLLLLSVGVGIYLLPNR

SEQ ID NO: 339 - protein, 591 aa, Artificial Sequence
  Synthetic peptid
SMSYTWTGALITPCAAEETKLPINALSNSLLRHHNLVYATTSRSASLRQKKVTFDRLQVLDDHYRDVLKEMKAKASTVKAKLLSVEEACKLTPPHSARSKFGYGAKDVRNLSSKAVNHIRSVWKDLLEDTETPIDTTIMAKNEVFCVQPEKGGRKPARLIVFPDLGVRVCEKMALYDVVSTLPQAVMGSSYGFQYSPGQRVEFLVNAWKAKKCPMGFAYDTRCFDSTVTENDIRVEESIYQCCDLAPEARQAIRSLTERLYIGGPLTNSKGQNCGYRRCRASGVLTTSCGNTLTCYLKAAAACRAAKLQDCTMLVCGDDLVVICESAGTQEDEASLRAFTEAMTRYSAPPGDPPKPEYDLELITSCSSNVSVAHDASGKRVYYLTRDPTTPLARAAWETARHTPVNSWLGNIIMYAPTVWARAILMTHFFSILLAQEQLEKTLDCQIYGACYSIEPLDLPQIIQRLHGLSAFSLHSYSPGEANRVVSCLRKLGIPPLRVWRHRARSVRARLLSQGGRAATCGKYLFNWAVRTKLKLTPIPAASQLDLSSWFVAGYSGGDIYHSLSRARPRWFMWCLLLLSVGVGIYLLPNR

SEQ ID NO: 340 - protein, 591 aa, Artificial Sequence
  Synthetic peptide
SMSYTWTGALITPCAAEETKLPINALSNSLLRHHNLVYATTSRSASLRQKKVTFDRLQVLDDHYRDVLKEMKAKASTVKAKLLSVEEACKLTPPHSARSKFGYGAKDVRNLSSKAVNHIRSVWKDLLEDTETPIDTTIMAKNEVFCVQPEKGGRKPARLIVFPDLGVRVCEKMALYDVVSTLPQAVMGSSYGFQYSPGQRVEFLVNAWKAKKCPMGFAYDTRCFDSTVTENDIRVEESIYQCCDLAPEARQAIRSLTERLYIGGPLTNSKGQNCGYRRCRASGVLTTSCGNTLTCYLKAAAACRAAKLQDCTMLVCGDDLVVICESAGTQEDEASLRAFTEAMTRYSAPPGDPPKPEYDLELITSCSSNVSVAHDASGKRVYYLTRDPTTPLARAAWETARHTPVNSWLGNIIMYAPTVWARAILMTHFFSILLAQEQLEKTLDCQIYGACYSIEPLDLPQIIQRLHGLSAFSLHSYSPGEANRVISCLRKLGIPPLRVWRHRARSVRARLLSQGGRAATCGKYLFNWAVRTKLKLTPIPAASQLDLSSWFVAGYSGGDIYHSLSRARPRWFMWCLLLLSVGVGIYLLPNR

SEQ ID NO: 341 - protein, 591 aa, Artificial Sequence
  Synthetic peptide
SMSYTWTGALITPCAAEETKLPINALSNSLLRHHNLVYATTSRSASLRQKKVTFDRLQVLDDHYRDVLKEMKAKASTVKAKLLSVEEACKLTPPHSARSKFGYGAKDVRNLSSKAVNHIRSVWKDLLEDTETPIDTTIMAKNEVFCVQPEKGGRKPARLIVFPDLGVRVCEKMALYDVVSTLPQAVMGSSYGFQYSPGQRVEFLVNAWKAKKCPMGFAYDTRCFDSTVTENDIRVEESIYQCCDLAPEARQAIRSLTERLYIGGPLTNSKGQNCGYRRCRASGVLTTSCGNTLTCYLKAAAACRAAKLQDCTMLVCGDDLVVICESAGTQEDEASLRAFTEAMTRYSAPPGDPPKPEYDLELITSCSSNVSVAHDASGKRVYYLTRDPTTPLARAAWETARHTPVNSWLGNIIMYAPTVWARAILMTHFFSILLAQEQLEKTLDCQIYGACYSIEPLDLPQIIQRLHGLSAFSLHSYSPGEANRVTSCLRKLGIPPLRVWRHRARSVRARLLSQGGRAATCGKYLFNWAVRTKLKLTPIPAASQLDLSSWFVAGYSGGDIYHSLSRARPRWFMWCLLLLSVGVGIYLLPNR

SEQ ID NO: 342 - protein, 591 aa, Artificial Sequence
  Synthetic peptide
SMSYTWTGALITPCAAEETKLPINALSNSLLRHHNLVYATTSRSASLRQKKVTFDRLQVLDDHYRDVLKEMKAKASTVKAKLLSVEEACKLTPPHSARSKFGYGAKDVRNLSSKAVNHIRSVWKDLLEDTETPIDTTIMAKNEVFCVQPEKGGRKPARLIVFPDLGVRVCEKMALYDVVSTLPQAVMGSSYGFQYSPGQRVEFLVNAWKAKKCPMGFAYDTRCFDSTVTENDIRVEESIYQCCDLAPEARQAIRSLTERLYIGGPLTNSKGQNCGYRRCRASGVLTTSCGNTLTCYLKAAAACRAAKLQDCTMLVCGDDLVVICESAGTQEDEASLRAFTEAMTRYSAPPGDPPKPEYDLELITSCSSNVSVAHDASGKRVYYLTRDPTTPLARAAWETARHTPVNSWLGNIIMYAPTVWARAILMTHFFSILLAQEQLEKTLDCQIYGACYSIEPLDLPQIIQRLHGLSAFSLHSYSPGEANRVSSCLRKLGIPPLRVWRHRARSVRARLLSQGGRAATCGKYLFNWAVRTKLKLTPIPAASQLDLSSWFVAGYSGGDIYHSLSRARPRWFMWCLLLLSVGVGIYLLPNR

SEQ ID NO: 343 - protein, 591 aa, Artificial Sequence
  Synthetic peptide
SMSYTWTGALITPCAAEETKLPINALSNSLLRHHNLVYATTSRSASLRQKKVTFDRLQVLDDHYRDVLKEMKAKASTVKAKLLSVEEACKLTPPHSARSKFGYGAKDVRNLSSKAVNHIRSVWKDLLEDTETPIDTTIMAKNEVFCVQPEKGGRKPARLIVFPDLGVRVCEKMALYDVVSTLPQAVMGSSYGFQYSPGQRVEFLVNAWKAKKCPMGFAYDTRCFDSTVTENDIRVEESIYQCCDLAPEARQAIRSLTERLYIGGPLTNSKGQNCGYRRCRASGVLTTSCGNTLTCYLKAAAACRAAKLQDCTMLVCGDDLVVICESAGTQEDEASLRAFTEAMTRYSAPPGDPPKPEYDLELITSCSSNVSVAHDASGKRVYYLTRDPTTPLARAAWETARHTPVNSWLGNIIMYAPTVWARMILMTHFFSILLAQEQLEKTLDCQIYGACYSIEPLDLPQIIQRLHGLSAFSLHSYSPGETNRVASCLRKLGVPPLRVWRHRARSVRARLLSQGGRAATCGKYLFNWAVRTKLKLTPIPAASQLDLSSWFVAGYSGGDIYHSLSRARPRWFMWCLLLLSVGVGIYLLPNR

SEQ ID NO: 344 - protein, 591 aa, Artificial Sequence
  Synthetic peptide
SMSYTWTGALITPCAAEETKLPINALSNSLLRHHNLVYATTSRSASLRQKKVTFDRLQVLDDHYRDVLKEMKAKASTVKAKLLSVEEACKLTPPHSARSKFGYGAKDVRNLSSKAVNHIRSVWKDLLEDTETPIDTTIMAKNEVFCVQPEKGGRKPARLIVFPDLGVRVCEKMALYDVVSTLPQAVMGSSYGFQYSPGQRVEFLVNAWKAKKCPMGFAYDTRCFDSTVTENDIRVEESIYQCCDLAPEARQAIRSLTERLYIGGPLTNSKGQNCGYRRCRASGVLTTSCGNTLTCYLKAAAACRAAKLQDCTMLVCGDDLVVICESAGTQEDEASLRAFTEAMTRYSAPPGDPPKPEYDLELITSCSSNVSVAHDASGKRVYYLTRDPTTPLARAAWETARHTPVNSWLGNIIMYAPTVWARMILMTHFFSILLAQEQLEKTLDCQIYGACYSIEPLDLPQIIQRLHGLSAFSLHSYSPGETNRVVSCLRKLGVPPLRVWRHRARSVRARLLSQGGRAATCGKYLFNWAVRTKLKLTPIPAASQLDLSSWFVAGYSGGDIYHSLSRARPRWFMWCLLLLSVGVGIYLLPNR

SEQ ID NO: 345 - protein, 591 aa, Artificial Sequence
  Synthetic peptide
SMSYTWTGALITPCAAEETKLPINALSNSLLRHHNLVYATTSRSASLRQKKVTFDRLQVLDDHYRDVLKEMKAKASTVKAKLLSVEEACKLTPPHSARSKFGYGAKDVRNLSSKAVNHIRSVWKDLLEDTETPIDTTIMAKNEVFCVQPEKGGRKPARLIVFPDLGVRVCEKMALYDVVSTLPQAVMGSSYGFQYSPGQRVEFLVNAWKAKKCPMGFAYDTRCFDSTVTENDIRVEESIYQCCDLAPEARQAIRSLTERLYIGGPLTNSKGQNCGYRRCRASGVLTTSCGNTLTCYLKAAAACRAAKLQDCTMLVCGDDLVVICESAGTQEDEASLRAFTEAMTRYSAPPGDPPKPEYDLELITSCSSNVSVAHDASGKRVYYLTRDPTTPLARAAWETARHTPVNSWLGNIIMYAPTVWARMILMTHFFSILLAQEQLEKTLDCQIYGACYSIEPLDLPQIIQRLHGLSAFSLHSYSPGETNRVISCLRKLGVPPLRVWRHRARSVRARLLSQGGRAATCGKYLFNWAVRTKLKLTPIPAASQLDLSSWFVAGYSGGDIYHSLSRARPRWFMWCLLLLSVGVGIYLLPNR

SEQ ID NO: 346 - protein, 591 aa, Artificial Sequence
  Synthetic peptide
SMSYTWTGALITPCAAEETKLPINALSNSLLRHHNLVYATTSRSASLRQKKVTFDRLQVLDDHYRDVLKEMKAKASTVKAKLLSVEEACKLTPPHSARSKFGYGAKDVRNLSSKAVNHIRSVWKDLLEDTETPIDTTIMAKNEVFCVQPEKGGRKPARLIVFPDLGVRVCEKMALYDVVSTLPQAVMGSSYGFQYSPGQRVEFLVNAWKAKKCPMGFAYDTRCFDSTVTENDIRVEESIYQCCDLAPEARQAIRSLTERLYIGGPLTNSKGQNCGYRRCRASGVLTTSCGNTLTCYLKAAAACRAAKLQDCTMLVCGDDLVVICESAGTQEDEASLRAFTEAMTRYSAPPGDPPKPEYDLELITSCSSNVSVAHDASGKRVYYLTRDPTTPLARAAWETARHTPVNSWLGNIIMYAPTVWARMILMTHFFSILLAQEQLEKTLDCQIYGACYSIEPLDLPQIIQRLHGLSAFSLHSYSPGETNRVTSCLRKLGVPPLRVWRHRARSVRARLLSQGGRAATCGKYLFNWAVRTKLKLTPIPAASQLDLSSWFVAGYSGGDIYHSLSRARPRWFMWCLLLLSVGVGIYLLPNR

SEQ ID NO: 347 - protein, 591 aa, Artificial Sequence
  Synthetic peptide
SMSYTWTGALITPCAAEETKLPINALSNSLLRHHNLVYATTSRSASLRQKKVTFDRLQVLDDHYRDVLKEMKAKASTVKAKLLSVEEACKLTPPHSARSKFGYGAKDVRNLSSKAVNHIRSVWKDLLEDTETPIDTTIMAKNEVFCVQPEKGGRKPARLIVFPDLGVRVCEKMALYDVVSTLPQAVMGSSYGFQYSPGQRVEFLVNAWKAKKCPMGFAYDTRCFDSTVTENDIRVEESIYQCCDLAPEARQAIRSLTERLYIGGPLTNSKGQNCGYRRCRASGVLTTSCGNTLTCYLKAAAACRAAKLQDCTMLVCGDDLVVICESAGTQEDEASLRAFTEAMTRYSAPPGDPPKPEYDLELITSCSSNVSVAHDASGKRVYYLTRDPTTPLARAAWETARHTPVNSWLGNIIMYAPTVWARMILMTHFFSILLAQEQLEKTLDCQIYGACYSIEPLDLPQIIQRLHGLSAFSLHSYSPGETNRVSSCLRKLGVPPLRVWRHRARSVRARLLSQGGRAATCGKYLFNWAVRTKLKLTPIPAASQLDLSSWFVAGYSGGDIYHSLSRARPRWFMWCLLLLSVGVGIYLLPNR

SEQ ID NO: 348 - protein, 591 aa, Artificial Sequence
  Synthetic peptide
SMSYTWTGALITPCAAEETKLPINALSNSLLRHHNLVYATTSRSASLRQKKVTFDRLQVLDDHYRDVLKEMKAKASTVKAKLLSVEEACKLTPPHSARSKFGYGAKDVRNLSSKAVNHIRSVWKDLLEDTETPIDTTIMAKNEVFCVQPEKGGRKPARLIVFPDLGVRVCEKMALYDVVSTLPQAVMGSSYGFQYSPGQRVEFLVNAWKAKKCPMGFAYDTRCFDSTVTENDIRVEESIYQCCDLAPEARQAIRSLTERLYIGGPLTNSKGQNCGYRRCRASGVLTTSCGNTLTCYLKAAAACRAAKLQDCTMLVCGDDLVVICESAGTQEDEASLRAFTEAMTRYSAPPGDPPKPEYDLELITSCSSNVSVAHDASGKRVYYLTRDPTTPLARAAWETARHTPVNSWLGNIIMYAPTVWARMILMTHFFSILLAQEQLEKTLDCQIYGACYSIEPLDLPQIIQRLHGLSAFSLHSYSPGETNRVASCLRKLGIPPLRVWRHRARSVRARLLSQGGRAATCGKYLFNWAVRTKLKLTPIPAASQLDLSSWFVAGYSGGDIYHSLSRARPRWFMWCLLLLSVGVGIYLLPNR

SEQ ID NO: 349 - protein, 591 aa, Artificial Sequence
  Synthetic peptide
SMSYTWTGALITPCAAEETKLPINALSNSLLRHHNLVYATTSRSASLRQKKVTFDRLQVLDDHYRDVLKEMKAKASTVKAKLLSVEEACKLTPPHSARSKFGYGAKDVRNLSSKAVNHIRSVWKDLLEDTETPIDTTIMAKNEVFCVQPEKGGRKPARLIVFPDLGVRVCEKMALYDVVSTLPQAVMGSSYGFQYSPGQRVEFLVNAWKAKKCPMGFAYDTRCFDSTVTENDIRVEESIYQCCDLAPEARQAIRSLTERLYIGGPLTNSKGQNCGYRRCRASGVLTTSCGNTLTCYLKAAAACRAAKLQDCTMLVCGDDLVVICESAGTQEDEASLRAFTEAMTRYSAPPGDPPKPEYDLELITSCSSNVSVAHDASGKRVYYLTRDPTTPLARAAWETARHTPVNSWLGNIIMYAPTVWARMILMTHFFSILLAQEQLEKTLDCQIYGACYSIEPLDLPQIIQRLHGLSAFSLHSYSPGETNRVVSCLRKLGIPPLRVWRHRARSVRARLLSQGGRAATCGKYLFNWAVRTKLKLTPIPAASQLDLSSWFVAGYSGGDIYHSLSRARPRWFMWCLLLLSVGVGIYLLPNR

SEQ ID NO: 350 - protein, 591 aa, Artificial Sequence
  Synthetic peptid
SMSYTWTGALITPCAAEETKLPINALSNSLLRHHNLVYATTSRSASLRQKKVTFDRLQVLDDHYRDVLKEMKAKASTVKAKLLSVEEACKLTPPHSARSKFGYGAKDVRNLSSKAVNHIRSVWKDLLEDTETPIDTTIMAKNEVFCVQPEKGGRKPARLIVFPDLGVRVCEKMALYDVVSTLPQAVMGSSYGFQYSPGQRVEFLVNAWKAKKCPMGFAYDTRCFDSTVTENDIRVEESIYQCCDLAPEARQAIRSLTERLYIGGPLTNSKGQNCGYRRCRASGVLTTSCGNTLTCYLKAAAACRAAKLQDCTMLVCGDDLVVICESAGTQEDEASLRAFTEAMTRYSAPPGDPPKPEYDLELITSCSSNVSVAHDASGKRVYYLTRDPTTPLARAAWETARHTPVNSWLGNIIMYAPTVWARMILMTHFFSILLAQEQLEKTLDCQIYGACYSIEPLDLPQIIQRLHGLSAFSLHSYSPGETNRVISCLRKLGIPPLRVWRHRARSVRARLLSQGGRAATCGKYLFNWAVRTKLKLTPIPAASQLDLSSWFVAGYSGGDIYHSLSRARPRWFMWCLLLLSVGVGIYLLPNR

SEQ ID NO: 351 - protein, 591 aa, Artificial Sequence
  Synthetic peptide
SMSYTWTGALITPCAAEETKLPINALSNSLLRHHNLVYATTSRSASLRQKKVTFDRLQVLDDHYRDVLKEMKAKASTVKAKLLSVEEACKLTPPHSARSKFGYGAKDVRNLSSKAVNHIRSVWKDLLEDTETPIDTTIMAKNEVFCVQPEKGGRKPARLIVFPDLGVRVCEKMALYDVVSTLPQAVMGSSYGFQYSPGQRVEFLVNAWKAKKCPMGFAYDTRCFDSTVTENDIRVEESIYQCCDLAPEARQAIRSLTERLYIGGPLTNSKGQNCGYRRCRASGVLTTSCGNTLTCYLKAAAACRAAKLQDCTMLVCGDDLVVICESAGTQEDEASLRAFTEAMTRYSAPPGDPPKPEYDLELITSCSSNVSVAHDASGKRVYYLTRDPTTPLARAAWETARHTPVNSWLGNIIMYAPTVWARMILMTHFFSILLAQEQLEKTLDCQIYGACYSIEPLDLPQIIQRLHGLSAFSLHSYSPGETNRVTSCLRKLGIPPLRVWRHRARSVRARLLSQGGRAATCGKYLFNWAVRTKLKLTPIPAASQLDLSSWFVAGYSGGDIYHSLSRARPRWFMWCLLLLSVGVGIYLLPNR

SEQ ID NO: 352 - protein, 591 aa, Artificial Sequence
  Synthetic peptide
SMSYTWTGALITPCAAEETKLPINALSNSLLRHHNLVYATTSRSASLRQKKVTFDRLQVLDDHYRDVLKEMKAKASTVKAKLLSVEEACKLTPPHSARSKFGYGAKDVRNLSSKAVNHIRSVWKDLLEDTETPIDTTIMAKNEVFCVQPEKGGRKPARLIVFPDLGVRVCEKMALYDVVSTLPQAVMGSSYGFQYSPGQRVEFLVNAWKAKKCPMGFAYDTRCFDSTVTENDIRVEESIYQCCDLAPEARQAIRSLTERLYIGGPLTNSKGQNCGYRRCRASGVLTTSCGNTLTCYLKAAAACRAAKLQDCTMLVCGDDLVVICESAGTQEDEASLRAFTEAMTRYSAPPGDPPKPEYDLELITSCSSNVSVAHDASGKRVYYLTRDPTTPLARAAWETARHTPVNSWLGNIIMYAPTVWARMILMTHFFSILLAQEQLEKTLDCQIYGACYSIEPLDLPQIIQRLHGLSAFSLHSYSPGETNRVSSCLRKLGIPPLRVWRHRARSVRARLLSQGGRAATCGKYLFNWAVRTKLKLTPIPAASQLDLSSWFVAGYSGGDIYHSLSRARPRWFMWCLLLLSVGVGIYLLPNR

SEQ ID NO: 353 - protein, 591 aa, Artificial Sequence
  Synthetic peptide
SMSYTWTGALITPCAAEETKLPINALSNSLLRHHNLVYATTSRSASLRQKKVTFDRLQVLDDHYRDVLKEMKAKASTVKAKLLSVEEACKLTPPHSARSKFGYGAKDVRNLSSKAVNHIRSVWKDLLEDTETPIDTTIMAKNEVFCVQPEKGGRKPARLIVFPDLGVRVCEKMALYDVVSTLPQAVMGSSYGFQYSPGQRVEFLVNAWKAKKCPMGFAYDTRCFDSTVTENDIRVEESIYQCCDLAPEARQAIRSLTERLYIGGPLTNSKGQNCGYRRCRASGVLTTSCGNTLTCYLKAAAACRAAKLQDCTMLVCGDDLVVICESAGTQEDEASLRAFTEAMTRYSAPPGDPPKPEYDLELITSCSSNVSVAHDASGKRVYYLTRDPTTPLARAAWETARHTPVNSWLGNIIMYAPTVWARAILMTHFFSILLAQEQLEKTLDCQIYGACYSIEPLDLPQIIQRLHGLSAFSLHSYSPGETNRVASCLRKLGVPPLRVWRHRARSVRARLLSQGGRAATCGKYLFNWAVRTKLKLTPIPAASQLDLSSWFVAGYSGGDIYHSLSRARPRWFMWCLLLLSVGVGIYLLPNR

SEQ ID NO: 354 - protein, 591 aa, Artificial Sequence
  Synthetic peptide
SMSYTWTGALITPCAAEETKLPINALSNSLLRHHNLVYATTSRSASLRQKKVTFDRLQVLDDHYRDVLKEMKAKASTVKAKLLSVEEACKLTPPHSARSKFGYGAKDVRNLSSKAVNHIRSVWKDLLEDTETPIDTTIMAKNEVFCVQPEKGGRKPARLIVFPDLGVRVCEKMALYDVVSTLPQAVMGSSYGFQYSPGQRVEFLVNAWKAKKCPMGFAYDTRCFDSTVTENDIRVEESIYQCCDLAPEARQAIRSLTERLYIGGPLTNSKGQNCGYRRCRASGVLTTSCGNTLTCYLKAAAACRAAKLQDCTMLVCGDDLVVICESAGTQEDEASLRAFTEAMTRYSAPPGDPPKPEYDLELITSCSSNVSVAHDASGKRVYYLTRDPTTPLARAAWETARHTPVNSWLGNIIMYAPTVWARAILMTHFFSILLAQEQLEKTLDCQIYGACYSIEPLDLPQIIQRLHGLSAFSLHSYSPGETNRVVSCLRKLGVPPLRVWRHRARSVRARLLSQGGRAATCGKYLFNWAVRTKLKLTPIPAASQLDLSSWFVAGYSGGDIYHSLSRARPRWFMWCLLLLSVGVGIYLLPNR

SEQ ID NO: 355 - protein, 591 aa, Artificial Sequence
  Synthetic peptide
SMSYTWTGALITPCAAEETKLPINALSNSLLRHHNLVYATTSRSASLRQKKVTFDRLQVLDDHYRDVLKEMKAKASTVKAKLLSVEEACKLTPPHSARSKFGYGAKDVRNLSSKAVNHIRSVWKDLLEDTETPIDTTIMAKNEVFCVQPEKGGRKPARLIVFPDLGVRVCEKMALYDVVSTLPQAVMGSSYGFQYSPGQRVEFLVNAWKAKKCPMGFAYDTRCFDSTVTENDIRVEESIYQCCDLAPEARQAIRSLTERLYIGGPLTNSKGQNCGYRRCRASGVLTTSCGNTLTCYLKAAAACRAAKLQDCTMLVCGDDLVVICESAGTQEDEASLRAFTEAMTRYSAPPGDPPKPEYDLELITSCSSNVSVAHDASGKRVYYLTRDPTTPLARAAWETARHTPVNSWLGNIIMYAPTVWARAILMTHFFSILLAQEQLEKTLDCQIYGACYSIEPLDLPQIIQRLHGLSAFSLHSYSPGETNRVISCLRKLGVPPLRVWRHRARSVRARLLSQGGRAATCGKYLFNWAVRTKLKLTPIPAASQLDLSSWFVAGYSGGDIYHSLSRARPRWFMWCLLLLSVGVGIYLLPNR

SEQ ID NO: 356 - protein, 591 aa, Artificial Sequence
  Synthetic peptide
SMSYTWTGALITPCAAEETKLPINALSNSLLRHHNLVYATTSRSASLRQKKVTFDRLQVLDDHYRDVLKEMKAKASTVKAKLLSVEEACKLTPPHSARSKFGYGAKDVRNLSSKAVNHIRSVWKDLLEDTETPIDTTIMAKNEVFCVQPEKGGRKPARLIVFPDLGVRVCEKMALYDVVSTLPQAVMGSSYGFQYSPGQRVEFLVNAWKAKKCPMGFAYDTRCFDSTVTENDIRVEESIYQCCDLAPEARQAIRSLTERLYIGGPLTNSKGQNCGYRRCRASGVLTTSCGNTLTCYLKAAAACRAAKLQDCTMLVCGDDLVVICESAGTQEDEASLRAFTEAMTRYSAPPGDPPKPEYDLELITSCSSNVSVAHDASGKRVYYLTRDPTTPLARAAWETARHTPVNSWLGNIIMYAPTVWARAILMTHFFSILLAQEQLEKTLDCQIYGACYSIEPLDLPQIIQRLHGLSAFSLHSYSPGETNRVTSCLRKLGVPPLRVWRHRARSVRARLLSQGGRAATCGKYLFNWAVRTKLKLTPIPAASQLDLSSWFVAGYSGGDIYHSLSRARPRWFMWCLLLLSVGVGIYLLPNR

SEQ ID NO: 357 - protein, 591 aa, Artificial Sequence
  Synthetic peptide
SMSYTWTGALITPCAAEETKLPINALSNSLLRHHNLVYATTSRSASLRQKKVTFDRLQVLDDHYRDVLKEMKAKASTVKAKLLSVEEACKLTPPHSARSKFGYGAKDVRNLSSKAVNHIRSVWKDLLEDTETPIDTTIMAKNEVFCVQPEKGGRKPARLIVFPDLGVRVCEKMALYDVVSTLPQAVMGSSYGFQYSPGQRVEFLVNAWKAKKCPMGFAYDTRCFDSTVTENDIRVEESIYQCCDLAPEARQAIRSLTERLYIGGPLTNSKGQNCGYRRCRASGVLTTSCGNTLTCYLKAAAACRAAKLQDCTMLVCGDDLVVICESAGTQEDEASLRAFTEAMTRYSAPPGDPPKPEYDLELITSCSSNVSVAHDASGKRVYYLTRDPTTPLARAAWETARHTPVNSWLGNIIMYAPTVWARAILMTHFFSILLAQEQLEKTLDCQIYGACYSIEPLDLPQIIQRLHGLSAFSLHSYSPGETNRVSSCLRKLGVPPLRVWRHRARSVRARLLSQGGRAATCGKYLFNWAVRTKLKLTPIPAASQLDLSSWFVAGYSGGDIYHSLSRARPRWFMWCLLLLSVGVGIYLLPNR

SEQ ID NO: 358 - protein, 591 aa, Artificial Sequence
  Synthetic peptide
SMSYTWTGALITPCAAEETKLPINALSNSLLRHHNLVYATTSRSASLRQKKVTFDRLQVLDDHYRDVLKEMKAKASTVKAKLLSVEEACKLTPPHSARSKFGYGAKDVRNLSSKAVNHIRSVWKDLLEDTETPIDTTIMAKNEVFCVQPEKGGRKPARLIVFPDLGVRVCEKMALYDVVSTLPQAVMGSSYGFQYSPGQRVEFLVNAWKAKKCPMGFAYDTRCFDSTVTENDIRVEESIYQCCDLAPEARQAIRSLTERLYIGGPLTNSKGQNCGYRRCRASGVLTTSCGNTLTCYLKAAAACRAAKLQDCTMLVCGDDLVVICESAGTQEDEASLRAFTEAMTRYSAPPGDPPKPEYDLELITSCSSNVSVAHDASGKRVYYLTRDPTTPLARAAWETARHTPVNSWLGNIIMYAPTVWARAILMTHFFSILLAQEQLEKTLDCQIYGACYSIEPLDLPQIIQRLHGLSAFSLHSYSPGETNRVASCLRKLGIPPLRVWRHRARSVRARLLSQGGRAATCGKYLFNWAVRTKLKLTPIPAASQLDLSSWFVAGYSGGDIYHSLSRARPRWFMWCLLLLSVGVGIYLLPNR

SEQ ID NO: 359 - protein, 591 aa, Artificial Sequence
  Synthetic peptide
SMSYTWTGALITPCAAEETKLPINALSNSLLRHHNLVYATTSRSASLRQKKVTFDRLQVLDDHYRDVLKEMKAKASTVKAKLLSVEEACKLTPPHSARSKFGYGAKDVRNLSSKAVNHIRSVWKDLLEDTETPIDTTIMAKNEVFCVQPEKGGRKPARLIVFPDLGVRVCEKMALYDVVSTLPQAVMGSSYGFQYSPGQRVEFLVNAWKAKKCPMGFAYDTRCFDSTVTENDIRVEESIYQCCDLAPEARQAIRSLTERLYIGGPLTNSKGQNCGYRRCRASGVLTTSCGNTLTCYLKAAAACRAAKLQDCTMLVCGDDLVVICESAGTQEDEASLRAFTEAMTRYSAPPGDPPKPEYDLELITSCSSNVSVAHDASGKRVYYLTRDPTTPLARAAWETARHTPVNSWLGNIIMYAPTVWARAILMTHFFSILLAQEQLEKTLDCQIYGACYSIEPLDLPQIIQRLHGLSAFSLHSYSPGETNRVVSCLRKLGIPPLRVWRHRARSVRARLLSQGGRAATCGKYLFNWAVRTKLKLTPIPAASQLDLSSWFVAGYSGGDIYHSLSRARPRWFMWCLLLLSVGVGIYLLPNR

SEQ ID NO: 360 - protein, 591 aa, Artificial Sequence
  Synthetic peptide
SMSYTWTGALITPCAAEETKLPINALSNSLLRHHNLVYATTSRSASLRQKKVTFDRLQVLDDHYRDVLKEMKAKASTVKAKLLSVEEACKLTPPHSARSKFGYGAKDVRNLSSKAVNHIRSVWKDLLEDTETPIDTTIMAKNEVFCVQPEKGGRKPARLIVFPDLGVRVCEKMALYDVVSTLPQAVMGSSYGFQYSPGQRVEFLVNAWKAKKCPMGFAYDTRCFDSTVTENDIRVEESIYQCCDLAPEARQAIRSLTERLYIGGPLTNSKGQNCGYRRCRASGVLTTSCGNTLTCYLKAAAACRAAKLQDCTMLVCGDDLVVICESAGTQEDEASLRAFTEAMTRYSAPPGDPPKPEYDLELITSCSSNVSVAHDASGKRVYYLTRDPTTPLARAAWETARHTPVNSWLGNIIMYAPTVWARAILMTHFFSILLAQEQLEKTLDCQIYGACYSIEPLDLPQIIQRLHGLSAFSLHSYSPGETNRVISCLRKLGIPPLRVWRHRARSVRARLLSQGGRAATCGKYLFNWAVRTKLKLTPIPAASQLDLSSWFVAGYSGGDIYHSLSRARPRWFMWCLLLLSVGVGIYLLPNR

SEQ ID NO: 361 - protein, 591 aa, Artificial Sequence
  Synthetic peptide
SMSYTWTGALITPCAAEETKLPINALSNSLLRHHNLVYATTSRSASLRQKKVTFDRLQVLDDHYRDVLKEMKAKASTVKAKLLSVEEACKLTPPHSARSKFGYGAKDVRNLSSKAVNHIRSVWKDLLEDTETPIDTTIMAKNEVFCVQPEKGGRKPARLIVFPDLGVRVCEKMALYDVVSTLPQAVMGSSYGFQYSPGQRVEFLVNAWKAKKCPMGFAYDTRCFDSTVTENDIRVEESIYQCCDLAPEARQAIRSLTERLYIGGPLTNSKGQNCGYRRCRASGVLTTSCGNTLTCYLKAAAACRAAKLQDCTMLVCGDDLVVICESAGTQEDEASLRAFTEAMTRYSAPPGDPPKPEYDLELITSCSSNVSVAHDASGKRVYYLTRDPTTPLARAAWETARHTPVNSWLGNIIMYAPTVWARAILMTHFFSILLAQEQLEKTLDCQIYGACYSIEPLDLPQIIQRLHGLSAFSLHSYSPGETNRVTSCLRKLGIPPLRVWRHRARSVRARLLSQGGRAATCGKYLFNWAVRTKLKLTPIPAASQLDLSSWFVAGYSGGDIYHSLSRARPRWFMWCLLLLSVGVGIYLLPNR

SEQ ID NO: 362 - protein, 591 aa, Artificial Sequence
  Synthetic peptide
SMSYTWTGALITPCAAEETKLPINALSNSLLRHHNLVYATTSRSASLRQKKVTFDRLQVLDDHYRDVLKEMKAKASTVKAKLLSVEEACKLTPPHSARSKFGYGAKDVRNLSSKAVNHIRSVWKDLLEDTETPIDTTIMAKNEVFCVQPEKGGRKPARLIVFPDLGVRVCEKMALYDVVSTLPQAVMGSSYGFQYSPGQRVEFLVNAWKAKKCPMGFAYDTRCFDSTVTENDIRVEESIYQCCDLAPEARQAIRSLTERLYIGGPLTNSKGQNCGYRRCRASGVLTTSCGNTLTCYLKAAAACRAAKLQDCTMLVCGDDLVVICESAGTQEDEASLRAFTEAMTRYSAPPGDPPKPEYDLELITSCSSNVSVAHDASGKRVYYLTRDPTTPLARAAWETARHTPVNSWLGNIIMYAPTVWARAILMTHFFSILLAQEQLEKTLDCQIYGACYSIEPLDLPQIIQRLHGLSAFSLHSYSPGETNRVSSCLRKLGIPPLRVWRHRARSVRARLLSQGGRAATCGKYLFNWAVRTKLKLTPIPAASQLDLSSWFVAGYSGGDIYHSLSRARPRWFMWCLLLLSVGVGIYLLPNR

SEQ ID NO: 363 - protein, 591 aa, Artificial Sequence
  Synthetic peptide
SMSYTWTGALITPCAAEETKLPINALSNSLLRHHNLVYATTSRSASLRQKKVTFDRLQVLDDHYRDVLKEMKAKASTVKAKLLSVEEACKLTPPHSARSKFGYGAKDVRNLSSKAVNHIRSVWKDLLEDTETPIDTTIMAKNEVFCVQPEKGGRKPARLIVFPDLGVRVCEKMALYDVVSTLPQAVMGSSYGFQYSPGQRVEFLVNAWKAKKCPMGFAYDTRCFDSTVTENDIRVEESIYQCCDLAPEARQAIRSLTERLYIGGPLTNSKGQNCGYRRCRASGVLTTSCGNTLTCYLKAAAACRAAKLQDCTMLVCGDDLVVICESAGTQEDEASLRAFTEAMTRYSAPPGDPPKPEYDLELITSCSSNVSVAHDASGKRVYYLTRDPTTPLARAAWETARHTPVNSWLGNIIMYAPTVWARMILMTHFFSILLAQEQLEKTLDCQIYGACYSIEPLDLPQIIQRLHGLSAFSLHSYSPGEVNRVASCLRKLGVPPLRVWRHRARSVRARLLSQGGRAATCGKYLFNWAVRTKLKLTPIPAASQLDLSSWFVAGYSGGDIYHSLSRARPRWFMWCLLLLSVGVGIYLLPNR

SEQ ID NO: 364 - protein, 591 aa, Artificial Sequence
  Synthetic peptide
SMSYTWTGALITPCAAEETKLPINALSNSLLRHHNLVYATTSRSASLRQKKVTFDRLQVLDDHYRDVLKEMKAKASTVKAKLLSVEEACKLTPPHSARSKFGYGAKDVRNLSSKAVNHIRSVWKDLLEDTETPIDTTIMAKNEVFCVQPEKGGRKPARLIVFPDLGVRVCEKMALYDVVSTLPQAVMGSSYGFQYSPGQRVEFLVNAWKAKKCPMGFAYDTRCFDSTVTENDIRVEESIYQCCDLAPEARQAIRSLTERLYIGGPLTNSKGQNCGYRRCRASGVLTTSCGNTLTCYLKAAAACRAAKLQDCTMLVCGDDLVVICESAGTQEDEASLRAFTEAMTRYSAPPGDPPKPEYDLELITSCSSNVSVAHDASGKRVYYLTRDPTTPLARAAWETARHTPVNSWLGNIIMYAPTVWARMILMTHFFSILLAQEQLEKTLDCQIYGACYSIEPLDLPQIIQRLHGLSAFSLHSYSPGEVNRVVSCLRKLGVPPLRVWRHRARSVRARLLSQGGRAATCGKYLFNWAVRTKLKLTPIPAASQLDLSSWFVAGYSGGDIYHSLSRARPRWFMWCLLLLSVGVGIYLLPNR

SEQ ID NO: 365 - protein, 591 aa, Artificial Sequence
  Synthetic peptide
SMSYTWTGALITPCAAEETKLPINALSNSLLRHHNLVYATTSRSASLRQKKVTFDRLQVLDDHYRDVLKEMKAKASTVKAKLLSVEEACKLTPPHSARSKFGYGAKDVRNLSSKAVNHIRSVWKDLLEDTETPIDTTIMAKNEVFCVQPEKGGRKPARLIVFPDLGVRVCEKMALYDVVSTLPQAVMGSSYGFQYSPGQRVEFLVNAWKAKKCPMGFAYDTRCFDSTVTENDIRVEESIYQCCDLAPEARQAIRSLTERLYIGGPLTNSKGQNCGYRRCRASGVLTTSCGNTLTCYLKAAAACRAAKLQDCTMLVCGDDLVVICESAGTQEDEASLRAFTEAMTRYSAPPGDPPKPEYDLELITSCSSNVSVAHDASGKRVYYLTRDPTTPLARAAWETARHTPVNSWLGNIIMYAPTVWARMILMTHFFSILLAQEQLEKTLDCQIYGACYSIEPLDLPQIIQRLHGLSAFSLHSYSPGEVNRVISCLRKLGVPPLRVWRHRARSVRARLLSQGGRAATCGKYLFNWAVRTKLKLTPIPAASQLDLSSWFVAGYSGGDIYHSLSRARPRWFMWCLLLLSVGVGIYLLPNR

SEQ ID NO: 366 - protein, 591 aa, Artificial Sequence
  Synthetic peptide
SMSYTWTGALITPCAAEETKLPINALSNSLLRHHNLVYATTSRSASLRQKKVTFDRLQVLDDHYRDVLKEMKAKASTVKAKLLSVEEACKLTPPHSARSKFGYGAKDVRNLSSKAVNHIRSVWKDLLEDTETPIDTTIMAKNEVFCVQPEKGGRKPARLIVFPDLGVRVCEKMALYDVVSTLPQAVMGSSYGFQYSPGQRVEFLVNAWKAKKCPMGFAYDTRCFDSTVTENDIRVEESIYQCCDLAPEARQAIRSLTERLYIGGPLTNSKGQNCGYRRCRASGVLTTSCGNTLTCYLKAAAACRAAKLQDCTMLVCGDDLVVICESAGTQEDEASLRAFTEAMTRYSAPPGDPPKPEYDLELITSCSSNVSVAHDASGKRVYYLTRDPTTPLARAAWETARHTPVNSWLGNIIMYAPTVWARMILMTHFFSILLAQEQLEKTLDCQIYGACYSIEPLDLPQIIQRLHGLSAFSLHSYSPGEVNRVTSCLRKLGVPPLRVWRHRARSVRARLLSQGGRAATCGKYLFNWAVRTKLKLTPIPAASQLDLSSWFVAGYSGGDIYHSLSRARPRWFMWCLLLLSVGVGIYLLPNR

SEQ ID NO: 367 - protein, 591 aa, Artificial Sequence
  Synthetic peptid
SMSYTWTGALITPCAAEETKLPINALSNSLLRHHNLVYATTSRSASLRQKKVTFDRLQVLDDHYRDVLKEMKAKASTVKAKLLSVEEACKLTPPHSARSKFGYGAKDVRNLSSKAVNHIRSVWKDLLEDTETPIDTTIMAKNEVFCVQPEKGGRKPARLIVFPDLGVRVCEKMALYDVVSTLPQAVMGSSYGFQYSPGQRVEFLVNAWKAKKCPMGFAYDTRCFDSTVTENDIRVEESIYQCCDLAPEARQAIRSLTERLYIGGPLTNSKGQNCGYRRCRASGVLTTSCGNTLTCYLKAAAACRAAKLQDCTMLVCGDDLVVICESAGTQEDEASLRAFTEAMTRYSAPPGDPPKPEYDLELITSCSSNVSVAHDASGKRVYYLTRDPTTPLARAAWETARHTPVNSWLGNIIMYAPTVWARMILMTHFFSILLAQEQLEKTLDCQIYGACYSIEPLDLPQIIQRLHGLSAFSLHSYSPGEVNRVSSCLRKLGVPPLRVWRHRARSVRARLLSQGGRAATCGKYLFNWAVRTKLKLTPIPAASQLDLSSWFVAGYSGGDIYHSLSRARPRWFMWCLLLLSVGVGIYLLPNR

SEQ ID NO: 368 - protein, 591 aa, Artificial Sequence
  Synthetic peptide
SMSYTWTGALITPCAAEETKLPINALSNSLLRHHNLVYATTSRSASLRQKKVTFDRLQVLDDHYRDVLKEMKAKASTVKAKLLSVEEACKLTPPHSARSKFGYGAKDVRNLSSKAVNHIRSVWKDLLEDTETPIDTTIMAKNEVFCVQPEKGGRKPARLIVFPDLGVRVCEKMALYDVVSTLPQAVMGSSYGFQYSPGQRVEFLVNAWKAKKCPMGFAYDTRCFDSTVTENDIRVEESIYQCCDLAPEARQAIRSLTERLYIGGPLTNSKGQNCGYRRCRASGVLTTSCGNTLTCYLKAAAACRAAKLQDCTMLVCGDDLVVICESAGTQEDEASLRAFTEAMTRYSAPPGDPPKPEYDLELITSCSSNVSVAHDASGKRVYYLTRDPTTPLARAAWETARHTPVNSWLGNIIMYAPTVWARMILMTHFFSILLAQEQLEKTLDCQIYGACYSIEPLDLPQIIQRLHGLSAFSLHSYSPGEVNRVASCLRKLGIPPLRVWRHRARSVRARLLSQGGRAATCGKYLFNWAVRTKLKLTPIPAASQLDLSSWFVAGYSGGDIYHSLSRARPRWFMWCLLLLSVGVGIYLLPNR

SEQ ID NO: 369 - protein, 591 aa, Artificial Sequence
  Synthetic peptide
SMSYTWTGALITPCAAEETKLPINALSNSLLRHHNLVYATTSRSASLRQKKVTFDRLQVLDDHYRDVLKEMKAKASTVKAKLLSVEEACKLTPPHSARSKFGYGAKDVRNLSSKAVNHIRSVWKDLLEDTETPIDTTIMAKNEVFCVQPEKGGRKPARLIVFPDLGVRVCEKMALYDVVSTLPQAVMGSSYGFQYSPGQRVEFLVNAWKAKKCPMGFAYDTRCFDSTVTENDIRVEESIYQCCDLAPEARQAIRSLTERLYIGGPLTNSKGQNCGYRRCRASGVLTTSCGNTLTCYLKAAAACRAAKLQDCTMLVCGDDLVVICESAGTQEDEASLRAFTEAMTRYSAPPGDPPKPEYDLELITSCSSNVSVAHDASGKRVYYLTRDPTTPLARAAWETARHTPVNSWLGNIIMYAPTVWARMILMTHFFSILLAQEQLEKTLDCQIYGACYSIEPLDLPQIIQRLHGLSAFSLHSYSPGEVNRVVSCLRKLGIPPLRVWRHRARSVRARLLSQGGRAATCGKYLFNWAVRTKLKLTPIPAASQLDLSSWFVAGYSGGDIYHSLSRARPRWFMWCLLLLSVGVGIYLLPNR

SEQ ID NO: 370 - protein, 591 aa, Artificial Sequence
  Synthetic peptide
SMSYTWTGALITPCAAEETKLPINALSNSLLRHHNLVYATTSRSASLRQKKVTFDRLQVLDDHYRDVLKEMKAKASTVKAKLLSVEEACKLTPPHSARSKFGYGAKDVRNLSSKAVNHIRSVWKDLLEDTETPIDTTIMAKNEVFCVQPEKGGRKPARLIVFPDLGVRVCEKMALYDVVSTLPQAVMGSSYGFQYSPGQRVEFLVNAWKAKKCPMGFAYDTRCFDSTVTENDIRVEESIYQCCDLAPEARQAIRSLTERLYIGGPLTNSKGQNCGYRRCRASGVLTTSCGNTLTCYLKAAAACRAAKLQDCTMLVCGDDLVVICESAGTQEDEASLRAFTEAMTRYSAPPGDPPKPEYDLELITSCSSNVSVAHDASGKRVYYLTRDPTTPLARAAWETARHTPVNSWLGNIIMYAPTVWARMILMTHFFSILLAQEQLEKTLDCQIYGACYSIEPLDLPQIIQRLHGLSAFSLHSYSPGEVNRVISCLRKLGIPPLRVWRHRARSVRARLLSQGGRAATCGKYLFNWAVRTKLKLTPIPAASQLDLSSWFVAGYSGGDIYHSLSRARPRWFMWCLLLLSVGVGIYLLPNR

SEQ ID NO: 371 - protein, 591 aa, Artificial Sequence
  Synthetic peptide
SMSYTWTGALITPCAAEETKLPINALSNSLLRHHNLVYATTSRSASLRQKKVTFDRLQVLDDHYRDVLKEMKAKASTVKAKLLSVEEACKLTPPHSARSKFGYGAKDVRNLSSKAVNHIRSVWKDLLEDTETPIDTTIMAKNEVFCVQPEKGGRKPARLIVFPDLGVRVCEKMALYDVVSTLPQAVMGSSYGFQYSPGQRVEFLVNAWKAKKCPMGFAYDTRCFDSTVTENDIRVEESIYQCCDLAPEARQAIRSLTERLYIGGPLTNSKGQNCGYRRCRASGVLTTSCGNTLTCYLKAAAACRAAKLQDCTMLVCGDDLVVICESAGTQEDEASLRAFTEAMTRYSAPPGDPPKPEYDLELITSCSSNVSVAHDASGKRVYYLTRDPTTPLARAAWETARHTPVNSWLGNIIMYAPTVWARMILMTHFFSILLAQEQLEKTLDCQIYGACYSIEPLDLPQIIQRLHGLSAFSLHSYSPGEVNRVTSCLRKLGIPPLRVWRHRARSVRARLLSQGGRAATCGKYLFNWAVRTKLKLTPIPAASQLDLSSWFVAGYSGGDIYHSLSRARPRWFMWCLLLLSVGVGIYLLPNR

SEQ ID NO: 372 - protein, 591 aa, Artificial Sequence
  Synthetic peptide
SMSYTWTGALITPCAAEETKLPINALSNSLLRHHNLVYATTSRSASLRQKKVTFDRLQVLDDHYRDVLKEMKAKASTVKAKLLSVEEACKLTPPHSARSKFGYGAKDVRNLSSKAVNHIRSVWKDLLEDTETPIDTTIMAKNEVFCVQPEKGGRKPARLIVFPDLGVRVCEKMALYDVVSTLPQAVMGSSYGFQYSPGQRVEFLVNAWKAKKCPMGFAYDTRCFDSTVTENDIRVEESIYQCCDLAPEARQAIRSLTERLYIGGPLTNSKGQNCGYRRCRASGVLTTSCGNTLTCYLKAAAACRAAKLQDCTMLVCGDDLVVICESAGTQEDEASLRAFTEAMTRYSAPPGDPPKPEYDLELITSCSSNVSVAHDASGKRVYYLTRDPTTPLARAAWETARHTPVNSWLGNIIMYAPTVWARMILMTHFFSILLAQEQLEKTLDCQIYGACYSIEPLDLPQIIQRLHGLSAFSLHSYSPGEVNRVSSCLRKLGIPPLRVWRHRARSVRARLLSQGGRAATCGKYLFNWAVRTKLKLTPIPAASQLDLSSWFVAGYSGGDIYHSLSRARPRWFMWCLLLLSVGVGIYLLPNR

SEQ ID NO: 373 - protein, 591 aa, Artificial Sequence
  Synthetic peptide
SMSYTWTGALITPCAAEETKLPINALSNSLLRHHNLVYATTSRSASLRQKKVTFDRLQVLDDHYRDVLKEMKAKASTVKAKLLSVEEACKLTPPHSARSKFGYGAKDVRNLSSKAVNHIRSVWKDLLEDTETPIDTTIMAKNEVFCVQPEKGGRKPARLIVFPDLGVRVCEKMALYDVVSTLPQAVMGSSYGFQYSPGQRVEFLVNAWKAKKCPMGFAYDTRCFDSTVTENDIRVEESIYQCCDLAPEARQAIRSLTERLYIGGPLTNSKGQNCGYRRCRASGVLTTSCGNTLTCYLKAAAACRAAKLQDCTMLVCGDDLVVICESAGTQEDEASLRAFTEAMTRYSAPPGDPPKPEYDLELITSCSSNVSVAHDASGKRVYYLTRDPTTPLARAAWETARHTPVNSWLGNIIMYAPTVWARAILMTHFFSILLAQEQLEKTLDCQIYGACYSIEPLDLPQIIQRLHGLSAFSLHSYSPGEVNRVASCLRKLGVPPLRVWRHRARSVRARLLSQGGRAATCGKYLFNWAVRTKLKLTPIPAASQLDLSSWFVAGYSGGDIYHSLSRARPRWFMWCLLLLSVGVGIYLLPNR

SEQ ID NO: 374 - protein, 591 aa, Artificial Sequence
  Synthetic peptide
SMSYTWTGALITPCAAEETKLPINALSNSLLRHHNLVYATTSRSASLRQKKVTFDRLQVLDDHYRDVLKEMKAKASTVKAKLLSVEEACKLTPPHSARSKFGYGAKDVRNLSSKAVNHIRSVWKDLLEDTETPIDTTIMAKNEVFCVQPEKGGRKPARLIVFPDLGVRVCEKMALYDVVSTLPQAVMGSSYGFQYSPGQRVEFLVNAWKAKKCPMGFAYDTRCFDSTVTENDIRVEESIYQCCDLAPEARQAIRSLTERLYIGGPLTNSKGQNCGYRRCRASGVLTTSCGNTLTCYLKAAAACRAAKLQDCTMLVCGDDLVVICESAGTQEDEASLRAFTEAMTRYSAPPGDPPKPEYDLELITSCSSNVSVAHDASGKRVYYLTRDPTTPLARAAWETARHTPVNSWLGNIIMYAPTVWARAILMTHFFSILLAQEQLEKTLDCQIYGACYSIEPLDLPQIIQRLHGLSAFSLHSYSPGEVNRVVSCLRKLGVPPLRVWRHRARSVRARLLSQGGRAATCGKYLFNWAVRTKLKLTPIPAASQLDLSSWFVAGYSGGDIYHSLSRARPRWFMWCLLLLSVGVGIYLLPNR

SEQ ID NO: 375 - protein, 591 aa, Artificial Sequence
  Synthetic peptide
SMSYTWTGALITPCAAEETKLPINALSNSLLRHHNLVYATTSRSASLRQKKVTFDRLQVLDDHYRDVLKEMKAKASTVKAKLLSVEEACKLTPPHSARSKFGYGAKDVRNLSSKAVNHIRSVWKDLLEDTETPIDTTIMAKNEVFCVQPEKGGRKPARLIVFPDLGVRVCEKMALYDVVSTLPQAVMGSSYGFQYSPGQRVEFLVNAWKAKKCPMGFAYDTRCFDSTVTENDIRVEESIYQCCDLAPEARQAIRSLTERLYIGGPLTNSKGQNCGYRRCRASGVLTTSCGNTLTCYLKAAAACRAAKLQDCTMLVCGDDLVVICESAGTQEDEASLRAFTEAMTRYSAPPGDPPKPEYDLELITSCSSNVSVAHDASGKRVYYLTRDPTTPLARAAWETARHTPVNSWLGNIIMYAPTVWARAILMTHFFSILLAQEQLEKTLDCQIYGACYSIEPLDLPQIIQRLHGLSAFSLHSYSPGEVNRVISCLRKLGVPPLRVWRHRARSVRARLLSQGGRAATCGKYLFNWAVRTKLKLTPIPAASQLDLSSWFVAGYSGGDIYHSLSRARPRWFMWCLLLLSVGVGIYLLPNR

SEQ ID NO: 376 - protein, 591 aa, Artificial Sequence
  Synthetic peptide
SMSYTWTGALITPCAAEETKLPINALSNSLLRHHNLVYATTSRSASLRQKKVTFDRLQVLDDHYRDVLKEMKAKASTVKAKLLSVEEACKLTPPHSARSKFGYGAKDVRNLSSKAVNHIRSVWKDLLEDTETPIDTTIMAKNEVFCVQPEKGGRKPARLIVFPDLGVRVCEKMALYDVVSTLPQAVMGSSYGFQYSPGQRVEFLVNAWKAKKCPMGFAYDTRCFDSTVTENDIRVEESIYQCCDLAPEARQAIRSLTERLYIGGPLTNSKGQNCGYRRCRASGVLTTSCGNTLTCYLKAAAACRAAKLQDCTMLVCGDDLVVICESAGTQEDEASLRAFTEAMTRYSAPPGDPPKPEYDLELITSCSSNVSVAHDASGKRVYYLTRDPTTPLARAAWETARHTPVNSWLGNIIMYAPTVWARAILMTHFFSILLAQEQLEKTLDCQIYGACYSIEPLDLPQIIQRLHGLSAFSLHSYSPGEVNRVTSCLRKLGVPPLRVWRHRARSVRARLLSQGGRAATCGKYLFNWAVRTKLKLTPIPAASQLDLSSWFVAGYSGGDIYHSLSRARPRWFMWCLLLLSVGVGIYLLPNR

SEQ ID NO: 377 - protein, 591 aa, Artificial Sequence
  Synthetic peptide
SMSYTWTGALITPCAAEETKLPINALSNSLLRHHNLVYATTSRSASLRQKKVTFDRLQVLDDHYRDVLKEMKAKASTVKAKLLSVEEACKLTPPHSARSKFGYGAKDVRNLSSKAVNHIRSVWKDLLEDTETPIDTTIMAKNEVFCVQPEKGGRKPARLIVFPDLGVRVCEKMALYDVVSTLPQAVMGSSYGFQYSPGQRVEFLVNAWKAKKCPMGFAYDTRCFDSTVTENDIRVEESIYQCCDLAPEARQAIRSLTERLYIGGPLTNSKGQNCGYRRCRASGVLTTSCGNTLTCYLKAAAACRAAKLQDCTMLVCGDDLVVICESAGTQEDEASLRAFTEAMTRYSAPPGDPPKPEYDLELITSCSSNVSVAHDASGKRVYYLTRDPTTPLARAAWETARHTPVNSWLGNIIMYAPTVWARAILMTHFFSILLAQEQLEKTLDCQIYGACYSIEPLDLPQIIQRLHGLSAFSLHSYSPGEVNRVSSCLRKLGVPPLRVWRHRARSVRARLLSQGGRAATCGKYLFNWAVRTKLKLTPIPAASQLDLSSWFVAGYSGGDIYHSLSRARPRWFMWCLLLLSVGVGIYLLPNR

SEQ ID NO: 378 - protein, 591 aa, Artificial Sequence
  Synthetic peptid
SMSYTWTGALITPCAAEETKLPINALSNSLLRHHNLVYATTSRSASLRQKKVTFDRLQVLDDHYRDVLKEMKAKASTVKAKLLSVEEACKLTPPHSARSKFGYGAKDVRNLSSKAVNHIRSVWKDLLEDTETPIDTTIMAKNEVFCVQPEKGGRKPARLIVFPDLGVRVCEKMALYDVVSTLPQAVMGSSYGFQYSPGQRVEFLVNAWKAKKCPMGFAYDTRCFDSTVTENDIRVEESIYQCCDLAPEARQAIRSLTERLYIGGPLTNSKGQNCGYRRCRASGVLTTSCGNTLTCYLKAAAACRAAKLQDCTMLVCGDDLVVICESAGTQEDEASLRAFTEAMTRYSAPPGDPPKPEYDLELITSCSSNVSVAHDASGKRVYYLTRDPTTPLARAAWETARHTPVNSWLGNIIMYAPTVWARAILMTHFFSILLAQEQLEKTLDCQIYGACYSIEPLDLPQIIQRLHGLSAFSLHSYSPGEVNRVASCLRKLGIPPLRVWRHRARSVRARLLSQGGRAATCGKYLFNWAVRTKLKLTPIPAASQLDLSSWFVAGYSGGDIYHSLSRARPRWFMWCLLLLSVGVGIYLLPNR

SEQ ID NO: 379 - protein, 591 aa, Artificial Sequence
  Synthetic peptide
SMSYTWTGALITPCAAEETKLPINALSNSLLRHHNLVYATTSRSASLRQKKVTFDRLQVLDDHYRDVLKEMKAKASTVKAKLLSVEEACKLTPPHSARSKFGYGAKDVRNLSSKAVNHIRSVWKDLLEDTETPIDTTIMAKNEVFCVQPEKGGRKPARLIVFPDLGVRVCEKMALYDVVSTLPQAVMGSSYGFQYSPGQRVEFLVNAWKAKKCPMGFAYDTRCFDSTVTENDIRVEESIYQCCDLAPEARQAIRSLTERLYIGGPLTNSKGQNCGYRRCRASGVLTTSCGNTLTCYLKAAAACRAAKLQDCTMLVCGDDLVVICESAGTQEDEASLRAFTEAMTRYSAPPGDPPKPEYDLELITSCSSNVSVAHDASGKRVYYLTRDPTTPLARAAWETARHTPVNSWLGNIIMYAPTVWARAILMTHFFSILLAQEQLEKTLDCQIYGACYSIEPLDLPQIIQRLHGLSAFSLHSYSPGEVNRVVSCLRKLGIPPLRVWRHRARSVRARLLSQGGRAATCGKYLFNWAVRTKLKLTPIPAASQLDLSSWFVAGYSGGDIYHSLSRARPRWFMWCLLLLSVGVGIYLLPNR

SEQ ID NO: 380 - protein, 591 aa, Artificial Sequence
  Synthetic peptide
SMSYTWTGALITPCAAEETKLPINALSNSLLRHHNLVYATTSRSASLRQKKVTFDRLQVLDDHYRDVLKEMKAKASTVKAKLLSVEEACKLTPPHSARSKFGYGAKDVRNLSSKAVNHIRSVWKDLLEDTETPIDTTIMAKNEVFCVQPEKGGRKPARLIVFPDLGVRVCEKMALYDVVSTLPQAVMGSSYGFQYSPGQRVEFLVNAWKAKKCPMGFAYDTRCFDSTVTENDIRVEESIYQCCDLAPEARQAIRSLTERLYIGGPLTNSKGQNCGYRRCRASGVLTTSCGNTLTCYLKAAAACRAAKLQDCTMLVCGDDLVVICESAGTQEDEASLRAFTEAMTRYSAPPGDPPKPEYDLELITSCSSNVSVAHDASGKRVYYLTRDPTTPLARAAWETARHTPVNSWLGNIIMYAPTVWARAILMTHFFSILLAQEQLEKTLDCQIYGACYSIEPLDLPQIIQRLHGLSAFSLHSYSPGEVNRVISCLRKLGIPPLRVWRHRARSVRARLLSQGGRAATCGKYLFNWAVRTKLKLTPIPAASQLDLSSWFVAGYSGGDIYHSLSRARPRWFMWCLLLLSVGVGIYLLPNR

SEQ ID NO: 381 - protein, 591 aa, Artificial Sequence
  Synthetic peptide
SMSYTWTGALITPCAAEETKLPINALSNSLLRHHNLVYATTSRSASLRQKKVTFDRLQVLDDHYRDVLKEMKAKASTVKAKLLSVEEACKLTPPHSARSKFGYGAKDVRNLSSKAVNHIRSVWKDLLEDTETPIDTTIMAKNEVFCVQPEKGGRKPARLIVFPDLGVRVCEKMALYDVVSTLPQAVMGSSYGFQYSPGQRVEFLVNAWKAKKCPMGFAYDTRCFDSTVTENDIRVEESIYQCCDLAPEARQAIRSLTERLYIGGPLTNSKGQNCGYRRCRASGVLTTSCGNTLTCYLKAAAACRAAKLQDCTMLVCGDDLVVICESAGTQEDEASLRAFTEAMTRYSAPPGDPPKPEYDLELITSCSSNVSVAHDASGKRVYYLTRDPTTPLARAAWETARHTPVNSWLGNIIMYAPTVWARAILMTHFFSILLAQEQLEKTLDCQIYGACYSIEPLDLPQIIQRLHGLSAFSLHSYSPGEVNRVTSCLRKLGIPPLRVWRHRARSVRARLLSQGGRAATCGKYLFNWAVRTKLKLTPIPAASQLDLSSWFVAGYSGGDIYHSLSRARPRWFMWCLLLLSVGVGIYLLPNR

SEQ ID NO: 382 - protein, 591 aa, Artificial Sequence
  Synthetic peptide
SMSYTWTGALITPCAAEETKLPINALSNSLLRHHNLVYATTSRSASLRQKKVTFDRLQVLDDHYRDVLKEMKAKASTVKAKLLSVEEACKLTPPHSARSKFGYGAKDVRNLSSKAVNHIRSVWKDLLEDTETPIDTTIMAKNEVFCVQPEKGGRKPARLIVFPDLGVRVCEKMALYDVVSTLPQAVMGSSYGFQYSPGQRVEFLVNAWKAKKCPMGFAYDTRCFDSTVTENDIRVEESIYQCCDLAPEARQAIRSLTERLYIGGPLTNSKGQNCGYRRCRASGVLTTSCGNTLTCYLKAAAACRAAKLQDCTMLVCGDDLVVICESAGTQEDEASLRAFTEAMTRYSAPPGDPPKPEYDLELITSCSSNVSVAHDASGKRVYYLTRDPTTPLARAAWETARHTPVNSWLGNIIMYAPTVWARAILMTHFFSILLAQEQLEKTLDCQIYGACYSIEPLDLPQIIQRLHGLSAFSLHSYSPGEVNRVSSCLRKLGIPPLRVWRHRARSVRARLLSQGGRAATCGKYLFNWAVRTKLKLTPIPAASQLDLSSWFVAGYSGGDIYHSLSRARPRWFMWCLLLLSVGVGIYLLPNR

SEQ ID NO: 383 - protein, 591 aa, Artificial Sequence
  Synthetic peptide
SMSYTWTGALITPCAAEETKLPINALSNSLLRHHNLVYATTSRSASLRQKKVTFDRLQVLDDHYRDVLKEMKAKASTVKAKLLSVEEACKLTPPHSARSKFGYGAKDVRNLSSKAVNHIRSVWKDLLEDTETPIDTTIMAKNEVFCVQPEKGGRKPARLIVFPDLGVRVCEKMALYDVVSTLPQAVMGSSYGFQYSPGQRVEFLVNAWKAKKCPMGFAYDTRCFDSTVTENDIRVEESIYQCCDLAPEARQAIRSLTERLYIGGPLTNSKGQNCGYRRCRASGVLTTSCGNTLTCYLKAAAACRAAKLQDCTMLVCGDDLVVICESAGTQEDEASLRAFTEAMTRYSAPPGDPPKPEYDLELITSCSSNVSVAHDASGKRVYYLTRDPTTPLARAAWETARHTPVNSWLGNIIMYAPTVWARMILMTHFFSILLAQEQLEKTLDCQIYGACYSIEPLDLPQIIQRLHGLSAFSLHSYSPGEDNRVASCLRKLGVPPLRVWRHRARSVRARLLSQGGRAATCGKYLFNWAVRTKLKLTPIPAASQLDLSSWFVAGYSGGDIYHSLSRARPRWFMWCLLLLSVGVGIYLLPNR

SEQ ID NO: 384 - protein, 591 aa, Artificial Sequence
  Synthetic peptide
SMSYTWTGALITPCAAEETKLPINALSNSLLRHHNLVYATTSRSASLRQKKVTFDRLQVLDDHYRDVLKEMKAKASTVKAKLLSVEEACKLTPPHSARSKFGYGAKDVRNLSSKAVNHIRSVWKDLLEDTETPIDTTIMAKNEVFCVQPEKGGRKPARLIVFPDLGVRVCEKMALYDVVSTLPQAVMGSSYGFQYSPGQRVEFLVNAWKAKKCPMGFAYDTRCFDSTVTENDIRVEESIYQCCDLAPEARQAIRSLTERLYIGGPLTNSKGQNCGYRRCRASGVLTTSCGNTLTCYLKAAAACRAAKLQDCTMLVCGDDLVVICESAGTQEDEASLRAFTEAMTRYSAPPGDPPKPEYDLELITSCSSNVSVAHDASGKRVYYLTRDPTTPLARAAWETARHTPVNSWLGNIIMYAPTVWARMILMTHFFSILLAQEQLEKTLDCQIYGACYSIEPLDLPQIIQRLHGLSAFSLHSYSPGEDNRVVSCLRKLGVPPLRVWRHRARSVRARLLSQGGRAATCGKYLFNWAVRTKLKLTPIPAASQLDLSSWFVAGYSGGDIYHSLSRARPRWFMWCLLLLSVGVGIYLLPNR

SEQ ID NO: 385 - protein, 591 aa, Artificial Sequence
  Synthetic peptide
SMSYTWTGALITPCAAEETKLPINALSNSLLRHHNLVYATTSRSASLRQKKVTFDRLQVLDDHYRDVLKEMKAKASTVKAKLLSVEEACKLTPPHSARSKFGYGAKDVRNLSSKAVNHIRSVWKDLLEDTETPIDTTIMAKNEVFCVQPEKGGRKPARLIVFPDLGVRVCEKMALYDVVSTLPQAVMGSSYGFQYSPGQRVEFLVNAWKAKKCPMGFAYDTRCFDSTVTENDIRVEESIYQCCDLAPEARQAIRSLTERLYIGGPLTNSKGQNCGYRRCRASGVLTTSCGNTLTCYLKAAAACRAAKLQDCTMLVCGDDLVVICESAGTQEDEASLRAFTEAMTRYSAPPGDPPKPEYDLELITSCSSNVSVAHDASGKRVYYLTRDPTTPLARAAWETARHTPVNSWLGNIIMYAPTVWARMILMTHFFSILLAQEQLEKTLDCQIYGACYSIEPLDLPQIIQRLHGLSAFSLHSYSPGEDNRVISCLRKLGVPPLRVWRHRARSVRARLLSQGGRAATCGKYLFNWAVRTKLKLTPIPAASQLDLSSWFVAGYSGGDIYHSLSRARPRWFMWCLLLLSVGVGIYLLPNR

SEQ ID NO: 386 - protein, 591 aa, Artificial Sequence
  Synthetic peptide
SMSYTWTGALITPCAAEETKLPINALSNSLLRHHNLVYATTSRSASLRQKKVTFDRLQVLDDHYRDVLKEMKAKASTVKAKLLSVEEACKLTPPHSARSKFGYGAKDVRNLSSKAVNHIRSVWKDLLEDTETPIDTTIMAKNEVFCVQPEKGGRKPARLIVFPDLGVRVCEKMALYDVVSTLPQAVMGSSYGFQYSPGQRVEFLVNAWKAKKCPMGFAYDTRCFDSTVTENDIRVEESIYQCCDLAPEARQAIRSLTERLYIGGPLTNSKGQNCGYRRCRASGVLTTSCGNTLTCYLKAAAACRAAKLQDCTMLVCGDDLVVICESAGTQEDEASLRAFTEAMTRYSAPPGDPPKPEYDLELITSCSSNVSVAHDASGKRVYYLTRDPTTPLARAAWETARHTPVNSWLGNIIMYAPTVWARMILMTHFFSILLAQEQLEKTLDCQIYGACYSIEPLDLPQIIQRLHGLSAFSLHSYSPGEDNRVTSCLRKLGVPPLRVWRHRARSVRARLLSQGGRAATCGKYLFNWAVRTKLKLTPIPAASQLDLSSWFVAGYSGGDIYHSLSRARPRWFMWCLLLLSVGVGIYLLPNR

SEQ ID NO: 387 - protein, 591 aa, Artificial Sequence
  Synthetic peptide
SMSYTWTGALITPCAAEETKLPINALSNSLLRHHNLVYATTSRSASLRQKKVTFDRLQVLDDHYRDVLKEMKAKASTVKAKLLSVEEACKLTPPHSARSKFGYGAKDVRNLSSKAVNHIRSVWKDLLEDTETPIDTTIMAKNEVFCVQPEKGGRKPARLIVFPDLGVRVCEKMALYDVVSTLPQAVMGSSYGFQYSPGQRVEFLVNAWKAKKCPMGFAYDTRCFDSTVTENDIRVEESIYQCCDLAPEARQAIRSLTERLYIGGPLTNSKGQNCGYRRCRASGVLTTSCGNTLTCYLKAAAACRAAKLQDCTMLVCGDDLVVICESAGTQEDEASLRAFTEAMTRYSAPPGDPPKPEYDLELITSCSSNVSVAHDASGKRVYYLTRDPTTPLARAAWETARHTPVNSWLGNIIMYAPTVWARMILMTHFFSILLAQEQLEKTLDCQIYGACYSIEPLDLPQIIQRLHGLSAFSLHSYSPGEDNRVSSCLRKLGVPPLRVWRHRARSVRARLLSQGGRAATCGKYLFNWAVRTKLKLTPIPAASQLDLSSWFVAGYSGGDIYHSLSRARPRWFMWCLLLLSVGVGIYLLPNR

SEQ ID NO: 388 - protein, 591 aa, Artificial Sequence
  Synthetic peptide
SMSYTWTGALITPCAAEETKLPINALSNSLLRHHNLVYATTSRSASLRQKKVTFDRLQVLDDHYRDVLKEMKAKASTVKAKLLSVEEACKLTPPHSARSKFGYGAKDVRNLSSKAVNHIRSVWKDLLEDTETPIDTTIMAKNEVFCVQPEKGGRKPARLIVFPDLGVRVCEKMALYDVVSTLPQAVMGSSYGFQYSPGQRVEFLVNAWKAKKCPMGFAYDTRCFDSTVTENDIRVEESIYQCCDLAPEARQAIRSLTERLYIGGPLTNSKGQNCGYRRCRASGVLTTSCGNTLTCYLKAAAACRAAKLQDCTMLVCGDDLVVICESAGTQEDEASLRAFTEAMTRYSAPPGDPPKPEYDLELITSCSSNVSVAHDASGKRVYYLTRDPTTPLARAAWETARHTPVNSWLGNIIMYAPTVWARMILMTHFFSILLAQEQLEKTLDCQIYGACYSIEPLDLPQIIQRLHGLSAFSLHSYSPGEDNRVASCLRKLGIPPLRVWRHRARSVRARLLSQGGRAATCGKYLFNWAVRTKLKLTPIPAASQLDLSSWFVAGYSGGDIYHSLSRARPRWFMWCLLLLSVGVGIYLLPNR

SEQ ID NO: 389 - protein, 591 aa, Artificial Sequence
  Synthetic peptid
SMSYTWTGALITPCAAEETKLPINALSNSLLRHHNLVYATTSRSASLRQKKVTFDRLQVLDDHYRDVLKEMKAKASTVKAKLLSVEEACKLTPPHSARSKFGYGAKDVRNLSSKAVNHIRSVWKDLLEDTETPIDTTIMAKNEVFCVQPEKGGRKPARLIVFPDLGVRVCEKMALYDVVSTLPQAVMGSSYGFQYSPGQRVEFLVNAWKAKKCPMGFAYDTRCFDSTVTENDIRVEESIYQCCDLAPEARQAIRSLTERLYIGGPLTNSKGQNCGYRRCRASGVLTTSCGNTLTCYLKAAAACRAAKLQDCTMLVCGDDLVVICESAGTQEDEASLRAFTEAMTRYSAPPGDPPKPEYDLELITSCSSNVSVAHDASGKRVYYLTRDPTTPLARAAWETARHTPVNSWLGNIIMYAPTVWARMILMTHFFSILLAQEQLEKTLDCQIYGACYSIEPLDLPQIIQRLHGLSAFSLHSYSPGEDNRVVSCLRKLGIPPLRVWRHRARSVRARLLSQGGRAATCGKYLFNWAVRTKLKLTPIPAASQLDLSSWFVAGYSGGDIYHSLSRARPRWFMWCLLLLSVGVGIYLLPNR

SEQ ID NO: 390 - protein, 591 aa, Artificial Sequence
  Synthetic peptide
SMSYTWTGALITPCAAEETKLPINALSNSLLRHHNLVYATTSRSASLRQKKVTFDRLQVLDDHYRDVLKEMKAKASTVKAKLLSVEEACKLTPPHSARSKFGYGAKDVRNLSSKAVNHIRSVWKDLLEDTETPIDTTIMAKNEVFCVQPEKGGRKPARLIVFPDLGVRVCEKMALYDVVSTLPQAVMGSSYGFQYSPGQRVEFLVNAWKAKKCPMGFAYDTRCFDSTVTENDIRVEESIYQCCDLAPEARQAIRSLTERLYIGGPLTNSKGQNCGYRRCRASGVLTTSCGNTLTCYLKAAAACRAAKLQDCTMLVCGDDLVVICESAGTQEDEASLRAFTEAMTRYSAPPGDPPKPEYDLELITSCSSNVSVAHDASGKRVYYLTRDPTTPLARAAWETARHTPVNSWLGNIIMYAPTVWARMILMTHFFSILLAQEQLEKTLDCQIYGACYSIEPLDLPQIIQRLHGLSAFSLHSYSPGEDNRVISCLRKLGIPPLRVWRHRARSVRARLLSQGGRAATCGKYLFNWAVRTKLKLTPIPAASQLDLSSWFVAGYSGGDIYHSLSRARPRWFMWCLLLLSVGVGIYLLPNR

SEQ ID NO: 391 - protein, 591 aa, Artificial Sequence
  Synthetic peptide
SMSYTWTGALITPCAAEETKLPINALSNSLLRHHNLVYATTSRSASLRQKKVTFDRLQVLDDHYRDVLKEMKAKASTVKAKLLSVEEACKLTPPHSARSKFGYGAKDVRNLSSKAVNHIRSVWKDLLEDTETPIDTTIMAKNEVFCVQPEKGGRKPARLIVFPDLGVRVCEKMALYDVVSTLPQAVMGSSYGFQYSPGQRVEFLVNAWKAKKCPMGFAYDTRCFDSTVTENDIRVEESIYQCCDLAPEARQAIRSLTERLYIGGPLTNSKGQNCGYRRCRASGVLTTSCGNTLTCYLKAAAACRAAKLQDCTMLVCGDDLVVICESAGTQEDEASLRAFTEAMTRYSAPPGDPPKPEYDLELITSCSSNVSVAHDASGKRVYYLTRDPTTPLARAAWETARHTPVNSWLGNIIMYAPTVWARMILMTHFFSILLAQEQLEKTLDCQIYGACYSIEPLDLPQIIQRLHGLSAFSLHSYSPGEDNRVTSCLRKLGIPPLRVWRHRARSVRARLLSQGGRAATCGKYLFNWAVRTKLKLTPIPAASQLDLSSWFVAGYSGGDIYHSLSRARPRWFMWCLLLLSVGVGIYLLPNR

SEQ ID NO: 392 - protein, 591 aa, Artificial Sequence
  Synthetic peptide
SMSYTWTGALITPCAAEETKLPINALSNSLLRHHNLVYATTSRSASLRQKKVTFDRLQVLDDHYRDVLKEMKAKASTVKAKLLSVEEACKLTPPHSARSKFGYGAKDVRNLSSKAVNHIRSVWKDLLEDTETPIDTTIMAKNEVFCVQPEKGGRKPARLIVFPDLGVRVCEKMALYDVVSTLPQAVMGSSYGFQYSPGQRVEFLVNAWKAKKCPMGFAYDTRCFDSTVTENDIRVEESIYQCCDLAPEARQAIRSLTERLYIGGPLTNSKGQNCGYRRCRASGVLTTSCGNTLTCYLKAAAACRAAKLQDCTMLVCGDDLVVICESAGTQEDEASLRAFTEAMTRYSAPPGDPPKPEYDLELITSCSSNVSVAHDASGKRVYYLTRDPTTPLARAAWETARHTPVNSWLGNIIMYAPTVWARMILMTHFFSILLAQEQLEKTLDCQIYGACYSIEPLDLPQIIQRLHGLSAFSLHSYSPGEDNRVSSCLRKLGIPPLRVWRHRARSVRARLLSQGGRAATCGKYLFNWAVRTKLKLTPIPAASQLDLSSWFVAGYSGGDIYHSLSRARPRWFMWCLLLLSVGVGIYLLPNR

SEQ ID NO: 393 - protein, 591 aa, Artificial Sequence
  Synthetic peptide
SMSYTWTGALITPCAAEETKLPINALSNSLLRHHNLVYATTSRSASLRQKKVTFDRLQVLDDHYRDVLKEMKAKASTVKAKLLSVEEACKLTPPHSARSKFGYGAKDVRNLSSKAVNHIRSVWKDLLEDTETPIDTTIMAKNEVFCVQPEKGGRKPARLIVFPDLGVRVCEKMALYDVVSTLPQAVMGSSYGFQYSPGQRVEFLVNAWKAKKCPMGFAYDTRCFDSTVTENDIRVEESIYQCCDLAPEARQAIRSLTERLYIGGPLTNSKGQNCGYRRCRASGVLTTSCGNTLTCYLKAAAACRAAKLQDCTMLVCGDDLVVICESAGTQEDEASLRAFTEAMTRYSAPPGDPPKPEYDLELITSCSSNVSVAHDASGKRVYYLTRDPTTPLARAAWETARHTPVNSWLGNIIMYAPTVWARAILMTHFFSILLAQEQLEKTLDCQIYGACYSIEPLDLPQIIQRLHGLSAFSLHSYSPGEDNRVASCLRKLGVPPLRVWRHRARSVRARLLSQGGRAATCGKYLFNWAVRTKLKLTPIPAASQLDLSSWFVAGYSGGDIYHSLSRARPRWFMWCLLLLSVGVGIYLLPNR

SEQ ID NO: 394 - protein, 591 aa, Artificial Sequence
  Synthetic peptide
SMSYTWTGALITPCAAEETKLPINALSNSLLRHHNLVYATTSRSASLRQKKVTFDRLQVLDDHYRDVLKEMKAKASTVKAKLLSVEEACKLTPPHSARSKFGYGAKDVRNLSSKAVNHIRSVWKDLLEDTETPIDTTIMAKNEVFCVQPEKGGRKPARLIVFPDLGVRVCEKMALYDVVSTLPQAVMGSSYGFQYSPGQRVEFLVNAWKAKKCPMGFAYDTRCFDSTVTENDIRVEESIYQCCDLAPEARQAIRSLTERLYIGGPLTNSKGQNCGYRRCRASGVLTTSCGNTLTCYLKAAAACRAAKLQDCTMLVCGDDLVVICESAGTQEDEASLRAFTEAMTRYSAPPGDPPKPEYDLELITSCSSNVSVAHDASGKRVYYLTRDPTTPLARAAWETARHTPVNSWLGNIIMYAPTVWARAILMTHFFSILLAQEQLEKTLDCQIYGACYSIEPLDLPQIIQRLHGLSAFSLHSYSPGEDNRVVSCLRKLGVPPLRVWRHRARSVRARLLSQGGRAATCGKYLFNWAVRTKLKLTPIPAASQLDLSSWFVAGYSGGDIYHSLSRARPRWFMWCLLLLSVGVGIYLLPNR

SEQ ID NO: 395 - protein, 591 aa, Artificial Sequence
  Synthetic peptide
SMSYTWTGALITPCAAEETKLPINALSNSLLRHHNLVYATTSRSASLRQKKVTFDRLQVLDDHYRDVLKEMKAKASTVKAKLLSVEEACKLTPPHSARSKFGYGAKDVRNLSSKAVNHIRSVWKDLLEDTETPIDTTIMAKNEVFCVQPEKGGRKPARLIVFPDLGVRVCEKMALYDVVSTLPQAVMGSSYGFQYSPGQRVEFLVNAWKAKKCPMGFAYDTRCFDSTVTENDIRVEESIYQCCDLAPEARQAIRSLTERLYIGGPLTNSKGQNCGYRRCRASGVLTTSCGNTLTCYLKAAAACRAAKLQDCTMLVCGDDLVVICESAGTQEDEASLRAFTEAMTRYSAPPGDPPKPEYDLELITSCSSNVSVAHDASGKRVYYLTRDPTTPLARAAWETARHTPVNSWLGNIIMYAPTVWARAILMTHFFSILLAQEQLEKTLDCQIYGACYSIEPLDLPQIIQRLHGLSAFSLHSYSPGEDNRVISCLRKLGVPPLRVWRHRARSVRARLLSQGGRAATCGKYLFNWAVRTKLKLTPIPAASQLDLSSWFVAGYSGGDIYHSLSRARPRWFMWCLLLLSVGVGIYLLPNR

SEQ ID NO: 396 - protein, 591 aa, Artificial Sequence
  Synthetic peptide
SMSYTWTGALITPCAAEETKLPINALSNSLLRHHNLVYATTSRSASLRQKKVTFDRLQVLDDHYRDVLKEMKAKASTVKAKLLSVEEACKLTPPHSARSKFGYGAKDVRNLSSKAVNHIRSVWKDLLEDTETPIDTTIMAKNEVFCVQPEKGGRKPARLIVFPDLGVRVCEKMALYDVVSTLPQAVMGSSYGFQYSPGQRVEFLVNAWKAKKCPMGFAYDTRCFDSTVTENDIRVEESIYQCCDLAPEARQAIRSLTERLYIGGPLTNSKGQNCGYRRCRASGVLTTSCGNTLTCYLKAAAACRAAKLQDCTMLVCGDDLVVICESAGTQEDEASLRAFTEAMTRYSAPPGDPPKPEYDLELITSCSSNVSVAHDASGKRVYYLTRDPTTPLARAAWETARHTPVNSWLGNIIMYAPTVWARAILMTHFFSILLAQEQLEKTLDCQIYGACYSIEPLDLPQIIQRLHGLSAFSLHSYSPGEDNRVTSCLRKLGVPPLRVWRHRARSVRARLLSQGGRAATCGKYLFNWAVRTKLKLTPIPAASQLDLSSWFVAGYSGGDIYHSLSRARPRWFMWCLLLLSVGVGIYLLPNR

SEQ ID NO: 397 - protein, 591 aa, Artificial Sequence
  Synthetic peptide
SMSYTWTGALITPCAAEETKLPINALSNSLLRHHNLVYATTSRSASLRQKKVTFDRLQVLDDHYRDVLKEMKAKASTVKAKLLSVEEACKLTPPHSARSKFGYGAKDVRNLSSKAVNHIRSVWKDLLEDTETPIDTTIMAKNEVFCVQPEKGGRKPARLIVFPDLGVRVCEKMALYDVVSTLPQAVMGSSYGFQYSPGQRVEFLVNAWKAKKCPMGFAYDTRCFDSTVTENDIRVEESIYQCCDLAPEARQAIRSLTERLYIGGPLTNSKGQNCGYRRCRASGVLTTSCGNTLTCYLKAAAACRAAKLQDCTMLVCGDDLVVICESAGTQEDEASLRAFTEAMTRYSAPPGDPPKPEYDLELITSCSSNVSVAHDASGKRVYYLTRDPTTPLARAAWETARHTPVNSWLGNIIMYAPTVWARAILMTHFFSILLAQEQLEKTLDCQIYGACYSIEPLDLPQIIQRLHGLSAFSLHSYSPGEDNRVSSCLRKLGVPPLRVWRHRARSVRARLLSQGGRAATCGKYLFNWAVRTKLKLTPIPAASQLDLSSWFVAGYSGGDIYHSLSRARPRWFMWCLLLLSVGVGIYLLPNR

SEQ ID NO: 398 - protein, 591 aa, Artificial Sequence
  Synthetic peptide
SMSYTWTGALITPCAAEETKLPINALSNSLLRHHNLVYATTSRSASLRQKKVTFDRLQVLDDHYRDVLKEMKAKASTVKAKLLSVEEACKLTPPHSARSKFGYGAKDVRNLSSKAVNHIRSVWKDLLEDTETPIDTTIMAKNEVFCVQPEKGGRKPARLIVFPDLGVRVCEKMALYDVVSTLPQAVMGSSYGFQYSPGQRVEFLVNAWKAKKCPMGFAYDTRCFDSTVTENDIRVEESIYQCCDLAPEARQAIRSLTERLYIGGPLTNSKGQNCGYRRCRASGVLTTSCGNTLTCYLKAAAACRAAKLQDCTMLVCGDDLVVICESAGTQEDEASLRAFTEAMTRYSAPPGDPPKPEYDLELITSCSSNVSVAHDASGKRVYYLTRDPTTPLARAAWETARHTPVNSWLGNIIMYAPTVWARAILMTHFFSILLAQEQLEKTLDCQIYGACYSIEPLDLPQIIQRLHGLSAFSLHSYSPGEDNRVASCLRKLGIPPLRVWRHRARSVRARLLSQGGRAATCGKYLFNWAVRTKLKLTPIPAASQLDLSSWFVAGYSGGDIYHSLSRARPRWFMWCLLLLSVGVGIYLLPNR

SEQ ID NO: 399 - protein, 591 aa, Artificial Sequence
  Synthetic peptid
SMSYTWTGALITPCAAEETKLPINALSNSLLRHHNLVYATTSRSASLRQKKVTFDRLQVLDDHYRDVLKEMKAKASTVKAKLLSVEEACKLTPPHSARSKFGYGAKDVRNLSSKAVNHIRSVWKDLLEDTETPIDTTIMAKNEVFCVQPEKGGRKPARLIVFPDLGVRVCEKMALYDVVSTLPQAVMGSSYGFQYSPGQRVEFLVNAWKAKKCPMGFAYDTRCFDSTVTENDIRVEESIYQCCDLAPEARQAIRSLTERLYIGGPLTNSKGQNCGYRRCRASGVLTTSCGNTLTCYLKAAAACRAAKLQDCTMLVCGDDLVVICESAGTQEDEASLRAFTEAMTRYSAPPGDPPKPEYDLELITSCSSNVSVAHDASGKRVYYLTRDPTTPLARAAWETARHTPVNSWLGNIIMYAPTVWARAILMTHFFSILLAQEQLEKTLDCQIYGACYSIEPLDLPQIIQRLHGLSAFSLHSYSPGEDNRVVSCLRKLGIPPLRVWRHRARSVRARLLSQGGRAATCGKYLFNWAVRTKLKLTPIPAASQLDLSSWFVAGYSGGDIYHSLSRARPRWFMWCLLLLSVGVGIYLLPNR

SEQ ID NO: 400 - protein, 591 aa, Artificial Sequence
  Synthetic peptide
SMSYTWTGALITPCAAEETKLPINALSNSLLRHHNLVYATTSRSASLRQKKVTFDRLQVLDDHYRDVLKEMKAKASTVKAKLLSVEEACKLTPPHSARSKFGYGAKDVRNLSSKAVNHIRSVWKDLLEDTETPIDTTIMAKNEVFCVQPEKGGRKPARLIVFPDLGVRVCEKMALYDVVSTLPQAVMGSSYGFQYSPGQRVEFLVNAWKAKKCPMGFAYDTRCFDSTVTENDIRVEESIYQCCDLAPEARQAIRSLTERLYIGGPLTNSKGQNCGYRRCRASGVLTTSCGNTLTCYLKAAAACRAAKLQDCTMLVCGDDLVVICESAGTQEDEASLRAFTEAMTRYSAPPGDPPKPEYDLELITSCSSNVSVAHDASGKRVYYLTRDPTTPLARAAWETARHTPVNSWLGNIIMYAPTVWARAILMTHFFSILLAQEQLEKTLDCQIYGACYSIEPLDLPQIIQRLHGLSAFSLHSYSPGEDNRVISCLRKLGIPPLRVWRHRARSVRARLLSQGGRAATCGKYLFNWAVRTKLKLTPIPAASQLDLSSWFVAGYSGGDIYHSLSRARPRWFMWCLLLLSVGVGIYLLPNR

SEQ ID NO: 401 - protein, 591 aa, Artificial Sequence
  Synthetic peptide
SMSYTWTGALITPCAAEETKLPINALSNSLLRHHNLVYATTSRSASLRQKKVTFDRLQVLDDHYRDVLKEMKAKASTVKAKLLSVEEACKLTPPHSARSKFGYGAKDVRNLSSKAVNHIRSVWKDLLEDTETPIDTTIMAKNEVFCVQPEKGGRKPARLIVFPDLGVRVCEKMALYDVVSTLPQAVMGSSYGFQYSPGQRVEFLVNAWKAKKCPMGFAYDTRCFDSTVTENDIRVEESIYQCCDLAPEARQAIRSLTERLYIGGPLTNSKGQNCGYRRCRASGVLTTSCGNTLTCYLKAAAACRAAKLQDCTMLVCGDDLVVICESAGTQEDEASLRAFTEAMTRYSAPPGDPPKPEYDLELITSCSSNVSVAHDASGKRVYYLTRDPTTPLARAAWETARHTPVNSWLGNIIMYAPTVWARAILMTHFFSILLAQEQLEKTLDCQIYGACYSIEPLDLPQIIQRLHGLSAFSLHSYSPGEDNRVTSCLRKLGIPPLRVWRHRARSVRARLLSQGGRAATCGKYLFNWAVRTKLKLTPIPAASQLDLSSWFVAGYSGGDIYHSLSRARPRWFMWCLLLLSVGVGIYLLPNR

SEQ ID NO: 402 - protein, 591 aa, Artificial Sequence
  Synthetic peptide
SMSYTWTGALITPCAAEETKLPINALSNSLLRHHNLVYATTSRSASLRQKKVTFDRLQVLDDHYRDVLKEMKAKASTVKAKLLSVEEACKLTPPHSARSKFGYGAKDVRNLSSKAVNHIRSVWKDLLEDTETPIDTTIMAKNEVFCVQPEKGGRKPARLIVFPDLGVRVCEKMALYDVVSTLPQAVMGSSYGFQYSPGQRVEFLVNAWKAKKCPMGFAYDTRCFDSTVTENDIRVEESIYQCCDLAPEARQAIRSLTERLYIGGPLTNSKGQNCGYRRCRASGVLTTSCGNTLTCYLKAAAACRAAKLQDCTMLVCGDDLVVICESAGTQEDEASLRAFTEAMTRYSAPPGDPPKPEYDLELITSCSSNVSVAHDASGKRVYYLTRDPTTPLARAAWETARHTPVNSWLGNIIMYAPTVWARAILMTHFFSILLAQEQLEKTLDCQIYGACYSIEPLDLPQIIQRLHGLSAFSLHSYSPGEDNRVSSCLRKLGIPPLRVWRHRARSVRARLLSQGGRAATCGKYLFNWAVRTKLKLTPIPAASQLDLSSWFVAGYSGGDIYHSLSRARPRWFMWCLLLLSVGVGIYLLPNR

SEQ ID NO: 403 - protein, 591 aa, Artificial Sequence
  Synthetic peptide
SMSYTWTGALITPCAAEETKLPINALSNSLLRHHNLVYATTSRSASLRQKKVTFDRLQVLDDHYRDVLKEMKAKASTVKAKLLSVEEACKLTPPHSARSKFGYGAKDVRNLSSKAVNHIRSVWKDLLEDTETPIDTTIMAKNEVFCVQPEKGGRKPARLIVFPDLGVRVCEKMALYDVVSTLPQAVMGSSYGFQYSPGQRVEFLVNAWKAKKCPMGFAYDTRCFDSTVTENDIRVEESIYQCCDLAPEARQAIRSLTERLYIGGPLTNSKGQNCGYRRCRASGVLTTSCGNTLTCYLKAAAACRAAKLQDCTMLVCGDDLVVICESAGTQEDEASLRAFTEAMTRYSAPPGDPPKPEYDLELITSCSSNVSVAHDASGKRVYYLTRDPTTPLARAAWETARHTPVNSWLGNIIMYAPTPWARMILMTHFFSILLAQEQLEKTLDCQIYGACYSIEPLDLPQIIQRLHGLSAFSLHSYSPGEINRVASCLRKLGVPPLRVWRHRARSVRARLLSQGGRAATCGKYLFNWAVRTKLKLTPIPAASQLDLSSWFVAGYSGGDIYHSLSRARPRWFMWCLLLLSVGVGIYLLPNR

SEQ ID NO: 404 - protein, 591 aa, Artificial Sequence
  Synthetic peptide
SMSYTWTGALITPCAAEETKLPINALSNSLLRHHNLVYATTSRSASLRQKKVTFDRLQVLDDHYRDVLKEMKAKASTVKAKLLSVEEACKLTPPHSARSKFGYGAKDVRNLSSKAVNHIRSVWKDLLEDTETPIDTTIMAKNEVFCVQPEKGGRKPARLIVFPDLGVRVCEKMALYDVVSTLPQAVMGSSYGFQYSPGQRVEFLVNAWKAKKCPMGFAYDTRCFDSTVTENDIRVEESIYQCCDLAPEARQAIRSLTERLYIGGPLTNSKGQNCGYRRCRASGVLTTSCGNTLTCYLKAAAACRAAKLQDCTMLVCGDDLVVICESAGTQEDEASLRAFTEAMTRYSAPPGDPPKPEYDLELITSCSSNVSVAHDASGKRVYYLTRDPTTPLARAAWETARHTPVNSWLGNIIMYAPTPWARMILMTHFFSILLAQEQLEKTLDCQIYGACYSIEPLDLPQIIQRLHGLSAFSLHSYSPGEINRVVSCLRKLGVPPLRVWRHRARSVRARLLSQGGRAATCGKYLFNWAVRTKLKLTPIPAASQLDLSSWFVAGYSGGDIYHSLSRARPRWFMWCLLLLSVGVGIYLLPNR

SEQ ID NO: 405 - protein, 591 aa, Artificial Sequence
  Synthetic peptide
SMSYTWTGALITPCAAEETKLPINALSNSLLRHHNLVYATTSRSASLRQKKVTFDRLQVLDDHYRDVLKEMKAKASTVKAKLLSVEEACKLTPPHSARSKFGYGAKDVRNLSSKAVNHIRSVWKDLLEDTETPIDTTIMAKNEVFCVQPEKGGRKPARLIVFPDLGVRVCEKMALYDVVSTLPQAVMGSSYGFQYSPGQRVEFLVNAWKAKKCPMGFAYDTRCFDSTVTENDIRVEESIYQCCDLAPEARQAIRSLTERLYIGGPLTNSKGQNCGYRRCRASGVLTTSCGNTLTCYLKAAAACRAAKLQDCTMLVCGDDLVVICESAGTQEDEASLRAFTEAMTRYSAPPGDPPKPEYDLELITSCSSNVSVAHDASGKRVYYLTRDPTTPLARAAWETARHTPVNSWLGNIIMYAPTPWARMILMTHFFSILLAQEQLEKTLDCQIYGACYSIEPLDLPQIIQRLHGLSAFSLHSYSPGEINRVISCLRKLGVPPLRVWRHRARSVRARLLSQGGRAATCGKYLFNWAVRTKLKLTPIPAASQLDLSSWFVAGYSGGDIYHSLSRARPRWFMWCLLLLSVGVGIYLLPNR

SEQ ID NO: 406 - protein, 591 aa, Artificial Sequence
  Synthetic peptide
SMSYTWTGALITPCAAEETKLPINALSNSLLRHHNLVYATTSRSASLRQKKVTFDRLQVLDDHYRDVLKEMKAKASTVKAKLLSVEEACKLTPPHSARSKFGYGAKDVRNLSSKAVNHIRSVWKDLLEDTETPIDTTIMAKNEVFCVQPEKGGRKPARLIVFPDLGVRVCEKMALYDVVSTLPQAVMGSSYGFQYSPGQRVEFLVNAWKAKKCPMGFAYDTRCFDSTVTENDIRVEESIYQCCDLAPEARQAIRSLTERLYIGGPLTNSKGQNCGYRRCRASGVLTTSCGNTLTCYLKAAAACRAAKLQDCTMLVCGDDLVVICESAGTQEDEASLRAFTEAMTRYSAPPGDPPKPEYDLELITSCSSNVSVAHDASGKRVYYLTRDPTTPLARAAWETARHTPVNSWLGNIIMYAPTPWARMILMTHFFSILLAQEQLEKTLDCQIYGACYSIEPLDLPQIIQRLHGLSAFSLHSYSPGEINRVTSCLRKLGVPPLRVWRHRARSVRARLLSQGGRAATCGKYLFNWAVRTKLKLTPIPAASQLDLSSWFVAGYSGGDIYHSLSRARPRWFMWCLLLLSVGVGIYLLPNR

SEQ ID NO: 407 - protein, 591 aa, Artificial Sequence
  Synthetic peptide
SMSYTWTGALITPCAAEETKLPINALSNSLLRHHNLVYATTSRSASLRQKKVTFDRLQVLDDHYRDVLKEMKAKASTVKAKLLSVEEACKLTPPHSARSKFGYGAKDVRNLSSKAVNHIRSVWKDLLEDTETPIDTTIMAKNEVFCVQPEKGGRKPARLIVFPDLGVRVCEKMALYDVVSTLPQAVMGSSYGFQYSPGQRVEFLVNAWKAKKCPMGFAYDTRCFDSTVTENDIRVEESIYQCCDLAPEARQAIRSLTERLYIGGPLTNSKGQNCGYRRCRASGVLTTSCGNTLTCYLKAAAACRAAKLQDCTMLVCGDDLVVICESAGTQEDEASLRAFTEAMTRYSAPPGDPPKPEYDLELITSCSSNVSVAHDASGKRVYYLTRDPTTPLARAAWETARHTPVNSWLGNIIMYAPTPWARMILMTHFFSILLAQEQLEKTLDCQIYGACYSIEPLDLPQIIQRLHGLSAFSLHSYSPGEINRVSSCLRKLGVPPLRVWRHRARSVRARLLSQGGRAATCGKYLFNWAVRTKLKLTPIPAASQLDLSSWFVAGYSGGDIYHSLSRARPRWFMWCLLLLSVGVGIYLLPNR

SEQ ID NO: 408 - protein, 591 aa, Artificial Sequence
  Synthetic peptide
SMSYTWTGALITPCAAEETKLPINALSNSLLRHHNLVYATTSRSASLRQKKVTFDRLQVLDDHYRDVLKEMKAKASTVKAKLLSVEEACKLTPPHSARSKFGYGAKDVRNLSSKAVNHIRSVWKDLLEDTETPIDTTIMAKNEVFCVQPEKGGRKPARLIVFPDLGVRVCEKMALYDVVSTLPQAVMGSSYGFQYSPGQRVEFLVNAWKAKKCPMGFAYDTRCFDSTVTENDIRVEESIYQCCDLAPEARQAIRSLTERLYIGGPLTNSKGQNCGYRRCRASGVLTTSCGNTLTCYLKAAAACRAAKLQDCTMLVCGDDLVVICESAGTQEDEASLRAFTEAMTRYSAPPGDPPKPEYDLELITSCSSNVSVAHDASGKRVYYLTRDPTTPLARAAWETARHTPVNSWLGNIIMYAPTPWARMILMTHFFSILLAQEQLEKTLDCQIYGACYSIEPLDLPQIIQRLHGLSAFSLHSYSPGEINRVASCLRKLGIPPLRVWRHRARSVRARLLSQGGRAATCGKYLFNWAVRTKLKLTPIPAASQLDLSSWFVAGYSGGDIYHSLSRARPRWFMWCLLLLSVGVGIYLLPNR

SEQ ID NO: 409 - protein, 591 aa, Artificial Sequence
  Synthetic peptid
SMSYTWTGALITPCAAEETKLPINALSNSLLRHHNLVYATTSRSASLRQKKVTFDRLQVLDDHYRDVLKEMKAKASTVKAKLLSVEEACKLTPPHSARSKFGYGAKDVRNLSSKAVNHIRSVWKDLLEDTETPIDTTIMAKNEVFCVQPEKGGRKPARLIVFPDLGVRVCEKMALYDVVSTLPQAVMGSSYGFQYSPGQRVEFLVNAWKAKKCPMGFAYDTRCFDSTVTENDIRVEESIYQCCDLAPEARQAIRSLTERLYIGGPLTNSKGQNCGYRRCRASGVLTTSCGNTLTCYLKAAAACRAAKLQDCTMLVCGDDLVVICESAGTQEDEASLRAFTEAMTRYSAPPGDPPKPEYDLELITSCSSNVSVAHDASGKRVYYLTRDPTTPLARAAWETARHTPVNSWLGNIIMYAPTPWARMILMTHFFSILLAQEQLEKTLDCQIYGACYSIEPLDLPQIIQRLHGLSAFSLHSYSPGEINRVVSCLRKLGIPPLRVWRHRARSVRARLLSQGGRAATCGKYLFNWAVRTKLKLTPIPAASQLDLSSWFVAGYSGGDIYHSLSRARPRWFMWCLLLLSVGVGIYLLPNR

SEQ ID NO: 410 - protein, 591 aa, Artificial Sequence
  Synthetic peptide
SMSYTWTGALITPCAAEETKLPINALSNSLLRHHNLVYATTSRSASLRQKKVTFDRLQVLDDHYRDVLKEMKAKASTVKAKLLSVEEACKLTPPHSARSKFGYGAKDVRNLSSKAVNHIRSVWKDLLEDTETPIDTTIMAKNEVFCVQPEKGGRKPARLIVFPDLGVRVCEKMALYDVVSTLPQAVMGSSYGFQYSPGQRVEFLVNAWKAKKCPMGFAYDTRCFDSTVTENDIRVEESIYQCCDLAPEARQAIRSLTERLYIGGPLTNSKGQNCGYRRCRASGVLTTSCGNTLTCYLKAAAACRAAKLQDCTMLVCGDDLVVICESAGTQEDEASLRAFTEAMTRYSAPPGDPPKPEYDLELITSCSSNVSVAHDASGKRVYYLTRDPTTPLARAAWETARHTPVNSWLGNIIMYAPTPWARMILMTHFFSILLAQEQLEKTLDCQIYGACYSIEPLDLPQIIQRLHGLSAFSLHSYSPGEINRVISCLRKLGIPPLRVWRHRARSVRARLLSQGGRAATCGKYLFNWAVRTKLKLTPIPAASQLDLSSWFVAGYSGGDIYHSLSRARPRWFMWCLLLLSVGVGIYLLPNR

SEQ ID NO: 411 - protein, 591 aa, Artificial Sequence
  Synthetic peptide
SMSYTWTGALITPCAAEETKLPINALSNSLLRHHNLVYATTSRSASLRQKKVTFDRLQVLDDHYRDVLKEMKAKASTVKAKLLSVEEACKLTPPHSARSKFGYGAKDVRNLSSKAVNHIRSVWKDLLEDTETPIDTTIMAKNEVFCVQPEKGGRKPARLIVFPDLGVRVCEKMALYDVVSTLPQAVMGSSYGFQYSPGQRVEFLVNAWKAKKCPMGFAYDTRCFDSTVTENDIRVEESIYQCCDLAPEARQAIRSLTERLYIGGPLTNSKGQNCGYRRCRASGVLTTSCGNTLTCYLKAAAACRAAKLQDCTMLVCGDDLVVICESAGTQEDEASLRAFTEAMTRYSAPPGDPPKPEYDLELITSCSSNVSVAHDASGKRVYYLTRDPTTPLARAAWETARHTPVNSWLGNIIMYAPTPWARMILMTHFFSILLAQEQLEKTLDCQIYGACYSIEPLDLPQIIQRLHGLSAFSLHSYSPGEINRVTSCLRKLGIPPLRVWRHRARSVRARLLSQGGRAATCGKYLFNWAVRTKLKLTPIPAASQLDLSSWFVAGYSGGDIYHSLSRARPRWFMWCLLLLSVGVGIYLLPNR

SEQ ID NO: 412 - protein, 591 aa, Artificial Sequence
  Synthetic peptide
SMSYTWTGALITPCAAEETKLPINALSNSLLRHHNLVYATTSRSASLRQKKVTFDRLQVLDDHYRDVLKEMKAKASTVKAKLLSVEEACKLTPPHSARSKFGYGAKDVRNLSSKAVNHIRSVWKDLLEDTETPIDTTIMAKNEVFCVQPEKGGRKPARLIVFPDLGVRVCEKMALYDVVSTLPQAVMGSSYGFQYSPGQRVEFLVNAWKAKKCPMGFAYDTRCFDSTVTENDIRVEESIYQCCDLAPEARQAIRSLTERLYIGGPLTNSKGQNCGYRRCRASGVLTTSCGNTLTCYLKAAAACRAAKLQDCTMLVCGDDLVVICESAGTQEDEASLRAFTEAMTRYSAPPGDPPKPEYDLELITSCSSNVSVAHDASGKRVYYLTRDPTTPLARAAWETARHTPVNSWLGNIIMYAPTPWARMILMTHFFSILLAQEQLEKTLDCQIYGACYSIEPLDLPQIIQRLHGLSAFSLHSYSPGEINRVSSCLRKLGIPPLRVWRHRARSVRARLLSQGGRAATCGKYLFNWAVRTKLKLTPIPAASQLDLSSWFVAGYSGGDIYHSLSRARPRWFMWCLLLLSVGVGIYLLPNR

SEQ ID NO: 413 - protein, 591 aa, Artificial Sequence
  Synthetic peptide
SMSYTWTGALITPCAAEETKLPINALSNSLLRHHNLVYATTSRSASLRQKKVTFDRLQVLDDHYRDVLKEMKAKASTVKAKLLSVEEACKLTPPHSARSKFGYGAKDVRNLSSKAVNHIRSVWKDLLEDTETPIDTTIMAKNEVFCVQPEKGGRKPARLIVFPDLGVRVCEKMALYDVVSTLPQAVMGSSYGFQYSPGQRVEFLVNAWKAKKCPMGFAYDTRCFDSTVTENDIRVEESIYQCCDLAPEARQAIRSLTERLYIGGPLTNSKGQNCGYRRCRASGVLTTSCGNTLTCYLKAAAACRAAKLQDCTMLVCGDDLVVICESAGTQEDEASLRAFTEAMTRYSAPPGDPPKPEYDLELITSCSSNVSVAHDASGKRVYYLTRDPTTPLARAAWETARHTPVNSWLGNIIMYAPTPWARAILMTHFFSILLAQEQLEKTLDCQIYGACYSIEPLDLPQIIQRLHGLSAFSLHSYSPGEINRVASCLRKLGVPPLRVWRHRARSVRARLLSQGGRAATCGKYLFNWAVRTKLKLTPIPAASQLDLSSWFVAGYSGGDIYHSLSRARPRWFMWCLLLLSVGVGIYLLPNR

SEQ ID NO: 414 - protein, 591 aa, Artificial Sequence
  Sythetic peptide
SMSYTWTGALITPCAAEETKLPINALSNSLLRHHNLVYATTSRSASLRQKKVTFDRLQVLDDHYRDVLKEMKAKASTVKAKLLSVEEACKLTPPHSARSKFGYGAKDVRNLSSKAVNHIRSVWKDLLEDTETPIDTTIMAKNEVFCVQPEKGGRKPARLIVFPDLGVRVCEKMALYDVVSTLPQAVMGSSYGFQYSPGQRVEFLVNAWKAKKCPMGFAYDTRCFDSTVTENDIRVEESIYQCCDLAPEARQAIRSLTERLYIGGPLTNSKGQNCGYRRCRASGVLTTSCGNTLTCYLKAAAACRAAKLQDCTMLVCGDDLVVICESAGTQEDEASLRAFTEAMTRYSAPPGDPPKPEYDLELITSCSSNVSVAHDASGKRVYYLTRDPTTPLARAAWETARHTPVNSWLGNIIMYAPTPWARAILMTHFFSILLAQEQLEKTLDCQIYGACYSIEPLDLPQIIQRLHGLSAFSLHSYSPGEINRVVSCLRKLGVPPLRVWRHRARSVRARLLSQGGRAATCGKYLFNWAVRTKLKLTPIPAASQLDLSSWFVAGYSGGDIYHSLSRARPRWFMWCLLLLSVGVGIYLLPNR

SEQ ID NO: 415 - protein, 591 aa, Artificial Sequence
  Synthetic peptide
SMSYTWTGALITPCAAEETKLPINALSNSLLRHHNLVYATTSRSASLRQKKVTFDRLQVLDDHYRDVLKEMKAKASTVKAKLLSVEEACKLTPPHSARSKFGYGAKDVRNLSSKAVNHIRSVWKDLLEDTETPIDTTIMAKNEVFCVQPEKGGRKPARLIVFPDLGVRVCEKMALYDVVSTLPQAVMGSSYGFQYSPGQRVEFLVNAWKAKKCPMGFAYDTRCFDSTVTENDIRVEESIYQCCDLAPEARQAIRSLTERLYIGGPLTNSKGQNCGYRRCRASGVLTTSCGNTLTCYLKAAAACRAAKLQDCTMLVCGDDLVVICESAGTQEDEASLRAFTEAMTRYSAPPGDPPKPEYDLELITSCSSNVSVAHDASGKRVYYLTRDPTTPLARAAWETARHTPVNSWLGNIIMYAPTPWARAILMTHFFSILLAQEQLEKTLDCQIYGACYSIEPLDLPQIIQRLHGLSAFSLHSYSPGEINRVISCLRKLGVPPLRVWRHRARSVRARLLSQGGRAATCGKYLFNWAVRTKLKLTPIPAASQLDLSSWFVAGYSGGDIYHSLSRARPRWFMWCLLLLSVGVGIYLLPNR

SEQ ID NO: 416 - protein, 591 aa, Artificial Sequence
  Synthetic peptide
SMSYTWTGALITPCAAEETKLPINALSNSLLRHHNLVYATTSRSASLRQKKVTFDRLQVLDDHYRDVLKEMKAKASTVKAKLLSVEEACKLTPPHSARSKFGYGAKDVRNLSSKAVNHIRSVWKDLLEDTETPIDTTIMAKNEVFCVQPEKGGRKPARLIVFPDLGVRVCEKMALYDVVSTLPQAVMGSSYGFQYSPGQRVEFLVNAWKAKKCPMGFAYDTRCFDSTVTENDIRVEESIYQCCDLAPEARQAIRSLTERLYIGGPLTNSKGQNCGYRRCRASGVLTTSCGNTLTCYLKAAAACRAAKLQDCTMLVCGDDLVVICESAGTQEDEASLRAFTEAMTRYSAPPGDPPKPEYDLELITSCSSNVSVAHDASGKRVYYLTRDPTTPLARAAWETARHTPVNSWLGNIIMYAPTPWARAILMTHFFSILLAQEQLEKTLDCQIYGACYSIEPLDLPQIIQRLHGLSAFSLHSYSPGEINRVTSCLRKLGVPPLRVWRHRARSVRARLLSQGGRAATCGKYLFNWAVRTKLKLTPIPAASQLDLSSWFVAGYSGGDIYHSLSRARPRWFMWCLLLLSVGVGIYLLPNR

SEQ ID NO: 417 - protein, 591 aa, Artificial Sequence
  Synthetic peptide
SMSYTWTGALITPCAAEETKLPINALSNSLLRHHNLVYATTSRSASLRQKKVTFDRLQVLDDHYRDVLKEMKAKASTVKAKLLSVEEACKLTPPHSARSKFGYGAKDVRNLSSKAVNHIRSVWKDLLEDTETPIDTTIMAKNEVFCVQPEKGGRKPARLIVFPDLGVRVCEKMALYDVVSTLPQAVMGSSYGFQYSPGQRVEFLVNAWKAKKCPMGFAYDTRCFDSTVTENDIRVEESIYQCCDLAPEARQAIRSLTERLYIGGPLTNSKGQNCGYRRCRASGVLTTSCGNTLTCYLKAAAACRAAKLQDCTMLVCGDDLVVICESAGTQEDEASLRAFTEAMTRYSAPPGDPPKPEYDLELITSCSSNVSVAHDASGKRVYYLTRDPTTPLARAAWETARHTPVNSWLGNIIMYAPTPWARAILMTHFFSILLAQEQLEKTLDCQIYGACYSIEPLDLPQIIQRLHGLSAFSLHSYSPGEINRVSSCLRKLGVPPLRVWRHRARSVRARLLSQGGRAATCGKYLFNWAVRTKLKLTPIPAASQLDLSSWFVAGYSGGDIYHSLSRARPRWFMWCLLLLSVGVGIYLLPNR

SEQ ID NO: 418 - protein, 591 aa, Artificial Sequence
  Synthetic peptide
SMSYTWTGALITPCAAEETKLPINALSNSLLRHHNLVYATTSRSASLRQKKVTFDRLQVLDDHYRDVLKEMKAKASTVKAKLLSVEEACKLTPPHSARSKFGYGAKDVRNLSSKAVNHIRSVWKDLLEDTETPIDTTIMAKNEVFCVQPEKGGRKPARLIVFPDLGVRVCEKMALYDVVSTLPQAVMGSSYGFQYSPGQRVEFLVNAWKAKKCPMGFAYDTRCFDSTVTENDIRVEESIYQCCDLAPEARQAIRSLTERLYIGGPLTNSKGQNCGYRRCRASGVLTTSCGNTLTCYLKAAAACRAAKLQDCTMLVCGDDLVVICESAGTQEDEASLRAFTEAMTRYSAPPGDPPKPEYDLELITSCSSNVSVAHDASGKRVYYLTRDPTTPLARAAWETARHTPVNSWLGNIIMYAPTPWARAILMTHFFSILLAQEQLEKTLDCQIYGACYSIEPLDLPQIIQRLHGLSAFSLHSYSPGEINRVASCLRKLGIPPLRVWRHRARSVRARLLSQGGRAATCGKYLFNWAVRTKLKLTPIPAASQLDLSSWFVAGYSGGDIYHSLSRARPRWFMWCLLLLSVGVGIYLLPNR

SEQ ID NO: 419 - protein, 591 aa, Artificial Sequence
  Synthetic peptid
SMSYTWTGALITPCAAEETKLPINALSNSLLRHHNLVYATTSRSASLRQKKVTFDRLQVLDDHYRDVLKEMKAKASTVKAKLLSVEEACKLTPPHSARSKFGYGAKDVRNLSSKAVNHIRSVWKDLLEDTETPIDTTIMAKNEVFCVQPEKGGRKPARLIVFPDLGVRVCEKMALYDVVSTLPQAVMGSSYGFQYSPGQRVEFLVNAWKAKKCPMGFAYDTRCFDSTVTENDIRVEESIYQCCDLAPEARQAIRSLTERLYIGGPLTNSKGQNCGYRRCRASGVLTTSCGNTLTCYLKAAAACRAAKLQDCTMLVCGDDLVVICESAGTQEDEASLRAFTEAMTRYSAPPGDPPKPEYDLELITSCSSNVSVAHDASGKRVYYLTRDPTTPLARAAWETARHTPVNSWLGNIIMYAPTPWARAILMTHFFSILLAQEQLEKTLDCQIYGACYSIEPLDLPQIIQRLHGLSAFSLHSYSPGEINRVVSCLRKLGIPPLRVWRHRARSVRARLLSQGGRAATCGKYLFNWAVRTKLKLTPIPAASQLDLSSWFVAGYSGGDIYHSLSRARPRWFMWCLLLLSVGVGIYLLPNR

SEQ ID NO: 420 - protein, 591 aa, Artificial Sequence
  Synthetic peptide
SMSYTWTGALITPCAAEETKLPINALSNSLLRHHNLVYATTSRSASLRQKKVTFDRLQVLDDHYRDVLKEMKAKASTVKAKLLSVEEACKLTPPHSARSKFGYGAKDVRNLSSKAVNHIRSVWKDLLEDTETPIDTTIMAKNEVFCVQPEKGGRKPARLIVFPDLGVRVCEKMALYDVVSTLPQAVMGSSYGFQYSPGQRVEFLVNAWKAKKCPMGFAYDTRCFDSTVTENDIRVEESIYQCCDLAPEARQAIRSLTERLYIGGPLTNSKGQNCGYRRCRASGVLTTSCGNTLTCYLKAAAACRAAKLQDCTMLVCGDDLVVICESAGTQEDEASLRAFTEAMTRYSAPPGDPPKPEYDLELITSCSSNVSVAHDASGKRVYYLTRDPTTPLARAAWETARHTPVNSWLGNIIMYAPTPWARAILMTHFFSILLAQEQLEKTLDCQIYGACYSIEPLDLPQIIQRLHGLSAFSLHSYSPGEINRVISCLRKLGIPPLRVWRHRARSVRARLLSQGGRAATCGKYLFNWAVRTKLKLTPIPAASQLDLSSWFVAGYSGGDIYHSLSRARPRWFMWCLLLLSVGVGIYLLPNR

SEQ ID NO: 421 - protein, 591 aa, Artificial Sequence
  Synthetic peptide
SMSYTWTGALITPCAAEETKLPINALSNSLLRHHNLVYATTSRSASLRQKKVTFDRLQVLDDHYRDVLKEMKAKASTVKAKLLSVEEACKLTPPHSARSKFGYGAKDVRNLSSKAVNHIRSVWKDLLEDTETPIDTTIMAKNEVFCVQPEKGGRKPARLIVFPDLGVRVCEKMALYDVVSTLPQAVMGSSYGFQYSPGQRVEFLVNAWKAKKCPMGFAYDTRCFDSTVTENDIRVEESIYQCCDLAPEARQAIRSLTERLYIGGPLTNSKGQNCGYRRCRASGVLTTSCGNTLTCYLKAAAACRAAKLQDCTMLVCGDDLVVICESAGTQEDEASLRAFTEAMTRYSAPPGDPPKPEYDLELITSCSSNVSVAHDASGKRVYYLTRDPTTPLARAAWETARHTPVNSWLGNIIMYAPTPWARAILMTHFFSILLAQEQLEKTLDCQIYGACYSIEPLDLPQIIQRLHGLSAFSLHSYSPGEINRVTSCLRKLGIPPLRVWRHRARSVRARLLSQGGRAATCGKYLFNWAVRTKLKLTPIPAASQLDLSSWFVAGYSGGDIYHSLSRARPRWFMWCLLLLSVGVGIYLLPNR

SEQ ID NO: 422 - protein, 591 aa, Artificial Sequence
  Synthetic peptide
SMSYTWTGALITPCAAEETKLPINALSNSLLRHHNLVYATTSRSASLRQKKVTFDRLQVLDDHYRDVLKEMKAKASTVKAKLLSVEEACKLTPPHSARSKFGYGAKDVRNLSSKAVNHIRSVWKDLLEDTETPIDTTIMAKNEVFCVQPEKGGRKPARLIVFPDLGVRVCEKMALYDVVSTLPQAVMGSSYGFQYSPGQRVEFLVNAWKAKKCPMGFAYDTRCFDSTVTENDIRVEESIYQCCDLAPEARQAIRSLTERLYIGGPLTNSKGQNCGYRRCRASGVLTTSCGNTLTCYLKAAAACRAAKLQDCTMLVCGDDLVVICESAGTQEDEASLRAFTEAMTRYSAPPGDPPKPEYDLELITSCSSNVSVAHDASGKRVYYLTRDPTTPLARAAWETARHTPVNSWLGNIIMYAPTPWARAILMTHFFSILLAQEQLEKTLDCQIYGACYSIEPLDLPQIIQRLHGLSAFSLHSYSPGEINRVSSCLRKLGIPPLRVWRHRARSVRARLLSQGGRAATCGKYLFNWAVRTKLKLTPIPAASQLDLSSWFVAGYSGGDIYHSLSRARPRWFMWCLLLLSVGVGIYLLPNR

SEQ ID NO: 423 - protein, 591 aa, Artificial Sequence
  Synthetic peptide
SMSYTWTGALITPCAAEETKLPINALSNSLLRHHNLVYATTSRSASLRQKKVTFDRLQVLDDHYRDVLKEMKAKASTVKAKLLSVEEACKLTPPHSARSKFGYGAKDVRNLSSKAVNHIRSVWKDLLEDTETPIDTTIMAKNEVFCVQPEKGGRKPARLIVFPDLGVRVCEKMALYDVVSTLPQAVMGSSYGFQYSPGQRVEFLVNAWKAKKCPMGFAYDTRCFDSTVTENDIRVEESIYQCCDLAPEARQAIRSLTERLYIGGPLTNSKGQNCGYRRCRASGVLTTSCGNTLTCYLKAAAACRAAKLQDCTMLVCGDDLVVICESAGTQEDEASLRAFTEAMTRYSAPPGDPPKPEYDLELITSCSSNVSVAHDASGKRVYYLTRDPTTPLARAAWETARHTPVNSWLGNIIMYAPTPWARMILMTHFFSILLAQEQLEKTLDCQIYGACYSIEPLDLPQIIQRLHGLSAFSLHSYSPGEANRVASCLRKLGVPPLRVWRHRARSVRARLLSQGGRAATCGKYLFNWAVRTKLKLTPIPAASQLDLSSWFVAGYSGGDIYHSLSRARPRWFMWCLLLLSVGVGIYLLPNR

SEQ ID NO: 424 - protein, 591 aa, Artificial Sequence
  Synthetic peptide
SMSYTWTGALITPCAAEETKLPINALSNSLLRHHNLVYATTSRSASLRQKKVTFDRLQVLDDHYRDVLKEMKAKASTVKAKLLSVEEACKLTPPHSARSKFGYGAKDVRNLSSKAVNHIRSVWKDLLEDTETPIDTTIMAKNEVFCVQPEKGGRKPARLIVFPDLGVRVCEKMALYDVVSTLPQAVMGSSYGFQYSPGQRVEFLVNAWKAKKCPMGFAYDTRCFDSTVTENDIRVEESIYQCCDLAPEARQAIRSLTERLYIGGPLTNSKGQNCGYRRCRASGVLTTSCGNTLTCYLKAAAACRAAKLQDCTMLVCGDDLVVICESAGTQEDEASLRAFTEAMTRYSAPPGDPPKPEYDLELITSCSSNVSVAHDASGKRVYYLTRDPTTPLARAAWETARHTPVNSWLGNIIMYAPTPWARMILMTHFFSILLAQEQLEKTLDCQIYGACYSIEPLDLPQIIQRLHGLSAFSLHSYSPGEANRVVSCLRKLGVPPLRVWRHRARSVRARLLSQGGRAATCGKYLFNWAVRTKLKLTPIPAASQLDLSSWFVAGYSGGDIYHSLSRARPRWFMWCLLLLSVGVGIYLLPNR

SEQ ID NO: 425 - protein, 591 aa, Artificial Sequence
  Synthetic peptide
SMSYTWTGALITPCAAEETKLPINALSNSLLRHHNLVYATTSRSASLRQKKVTFDRLQVLDDHYRDVLKEMKAKASTVKAKLLSVEEACKLTPPHSARSKFGYGAKDVRNLSSKAVNHIRSVWKDLLEDTETPIDTTIMAKNEVFCVQPEKGGRKPARLIVFPDLGVRVCEKMALYDVVSTLPQAVMGSSYGFQYSPGQRVEFLVNAWKAKKCPMGFAYDTRCFDSTVTENDIRVEESIYQCCDLAPEARQAIRSLTERLYIGGPLTNSKGQNCGYRRCRASGVLTTSCGNTLTCYLKAAAACRAAKLQDCTMLVCGDDLVVICESAGTQEDEASLRAFTEAMTRYSAPPGDPPKPEYDLELITSCSSNVSVAHDASGKRVYYLTRDPTTPLARAAWETARHTPVNSWLGNIIMYAPTPWARMILMTHFFSILLAQEQLEKTLDCQIYGACYSIEPLDLPQIIQRLHGLSAFSLHSYSPGEANRVISCLRKLGVPPLRVWRHRARSVRARLLSQGGRAATCGKYLFNWAVRTKLKLTPIPAASQLDLSSWFVAGYSGGDIYHSLSRARPRWFMWCLLLLSVGVGIYLLPNR

SEQ ID NO: 426 - protein, 591 aa, Artificial Sequence
  Synthetic peptide
SMSYTWTGALITPCAAEETKLPINALSNSLLRHHNLVYATTSRSASLRQKKVTFDRLQVLDDHYRDVLKEMKAKASTVKAKLLSVEEACKLTPPHSARSKFGYGAKDVRNLSSKAVNHIRSVWKDLLEDTETPIDTTIMAKNEVFCVQPEKGGRKPARLIVFPDLGVRVCEKMALYDVVSTLPQAVMGSSYGFQYSPGQRVEFLVNAWKAKKCPMGFAYDTRCFDSTVTENDIRVEESIYQCCDLAPEARQAIRSLTERLYIGGPLTNSKGQNCGYRRCRASGVLTTSCGNTLTCYLKAAAACRAAKLQDCTMLVCGDDLVVICESAGTQEDEASLRAFTEAMTRYSAPPGDPPKPEYDLELITSCSSNVSVAHDASGKRVYYLTRDPTTPLARAAWETARHTPVNSWLGNIIMYAPTPWARMILMTHFFSILLAQEQLEKTLDCQIYGACYSIEPLDLPQIIQRLHGLSAFSLHSYSPGEANRVTSCLRKLGVPPLRVWRHRARSVRARLLSQGGRAATCGKYLFNWAVRTKLKLTPIPAASQLDLSSWFVAGYSGGDIYHSLSRARPRWFMWCLLLLSVGVGIYLLPNR

SEQ ID NO: 427 - protein, 591 aa, Artificial Sequence
  Synthetic peptide
SMSYTWTGALITPCAAEETKLPINALSNSLLRHHNLVYATTSRSASLRQKKVTFDRLQVLDDHYRDVLKEMKAKASTVKAKLLSVEEACKLTPPHSARSKFGYGAKDVRNLSSKAVNHIRSVWKDLLEDTETPIDTTIMAKNEVFCVQPEKGGRKPARLIVFPDLGVRVCEKMALYDVVSTLPQAVMGSSYGFQYSPGQRVEFLVNAWKAKKCPMGFAYDTRCFDSTVTENDIRVEESIYQCCDLAPEARQAIRSLTERLYIGGPLTNSKGQNCGYRRCRASGVLTTSCGNTLTCYLKAAAACRAAKLQDCTMLVCGDDLVVICESAGTQEDEASLRAFTEAMTRYSAPPGDPPKPEYDLELITSCSSNVSVAHDASGKRVYYLTRDPTTPLARAAWETARHTPVNSWLGNIIMYAPTPWARMILMTHFFSILLAQEQLEKTLDCQIYGACYSIEPLDLPQIIQRLHGLSAFSLHSYSPGEANRVSSCLRKLGVPPLRVWRHRARSVRARLLSQGGRAATCGKYLFNWAVRTKLKLTPIPAASQLDLSSWFVAGYSGGDIYHSLSRARPRWFMWCLLLLSVGVGIYLLPNR

SEQ ID NO: 428 - protein, 591 aa, Artificial Sequence
  Synthetic peptide
SMSYTWTGALITPCAAEETKLPINALSNSLLRHHNLVYATTSRSASLRQKKVTFDRLQVLDDHYRDVLKEMKAKASTVKAKLLSVEEACKLTPPHSARSKFGYGAKDVRNLSSKAVNHIRSVWKDLLEDTETPIDTTIMAKNEVFCVQPEKGGRKPARLIVFPDLGVRVCEKMALYDVVSTLPQAVMGSSYGFQYSPGQRVEFLVNAWKAKKCPMGFAYDTRCFDSTVTENDIRVEESIYQCCDLAPEARQAIRSLTERLYIGGPLTNSKGQNCGYRRCRASGVLTTSCGNTLTCYLKAAAACRAAKLQDCTMLVCGDDLVVICESAGTQEDEASLRAFTEAMTRYSAPPGDPPKPEYDLELITSCSSNVSVAHDASGKRVYYLTRDPTTPLARAAWETARHTPVNSWLGNIIMYAPTPWARMILMTHFFSILLAQEQLEKTLDCQIYGACYSIEPLDLPQIIQRLHGLSAFSLHSYSPGEANRVASCLRKLGIPPLRVWRHRARSVRARLLSQGGRAATCGKYLFNWAVRTKLKLTPIPAASQLDLSSWFVAGYSGGDIYHSLSRARPRWFMWCLLLLSVGVGIYLLPNR

SEQ ID NO: 429 - protein, 591 aa, Artificial Sequence
  Synthetic peptide
SMSYTWTGALITPCAAEETKLPINALSNSLLRHHNLVYATTSRSASLRQKKVTFDRLQVLDDHYRDVLKEMKAKASTVKAKLLSVEEACKLTPPHSARSKFGYGAKDVRNLSSKAVNHIRSVWKDLLEDTETPIDTTIMAKNEVFCVQPEKGGRKPARLIVFPDLGVRVCEKMALYDVVSTLPQAVMGSSYGFQYSPGQRVEFLVNAWKAKKCPMGFAYDTRCFDSTVTENDIRVEESIYQCCDLAPEARQAIRSLTERLYIGGPLTNSKGQNCGYRRCRASGVLTTSCGNTLTCYLKAAAACRAAKLQDCTMLVCGDDLVVICESAGTQEDEASLRAFTEAMTRYSAPPGDPPKPEYDLELITSCSSNVSVAHDASGKRVYYLTRDPTTPLARAAWETARHTPVNSWLGNIIMYAPTPWARMILMTHFFSILLAQEQLEKTLDCQIYGACYSIEPLDLPQIIQRLHGLSAFSLHSYSPGEANRVVSCLRKLGIPPLRVWRHRARSVRARLLSQGGRAATCGKYLFNWAVRTKLKLTPIPAASQLDLSSWFVAGYSGGDIYHSLSRARPRWFMWCLLLLSVGVGIYLLPNR

SEQ ID NO: 430 - protein, 591 aa, Artificial Sequence
  Synthetic peptide
SMSYTWTGALITPCAAEETKLPINALSNSLLRHHNLVYATTSRSASLRQKKVTFDRLQVLDDHYRDVLKEMKAKASTVKAKLLSVEEACKLTPPHSARSKFGYGAKDVRNLSSKAVNHIRSVWKDLLEDTETPIDTTIMAKNEVFCVQPEKGGRKPARLIVFPDLGVRVCEKMALYDVVSTLPQAVMGSSYGFQYSPGQRVEFLVNAWKAKKCPMGFAYDTRCFDSTVTENDIRVEESIYQCCDLAPEARQAIRSLTERLYIGGPLTNSKGQNCGYRRCRASGVLTTSCGNTLTCYLKAAAACRAAKLQDCTMLVCGDDLVVICESAGTQEDEASLRAFTEAMTRYSAPPGDPPKPEYDLELITSCSSNVSVAHDASGKRVYYLTRDPTTPLARAAWETARHTPVNSWLGNIIMYAPTPWARMILMTHFFSILLAQEQLEKTLDCQIYGACYSIEPLDLPQIIQRLHGLSAFSLHSYSPGEANRVISCLRKLGIPPLRVWRHRARSVRARLLSQGGRAATCGKYLFNWAVRTKLKLTPIPAASQLDLSSWFVAGYSGGDIYHSLSRARPRWFMWCLLLLSVGVGIYLLPNR

SEQ ID NO: 431 - protein, 591 aa, Artificial Sequence
  Synthetic peptide
SMSYTWTGALITPCAAEETKLPINALSNSLLRHHNLVYATTSRSASLRQKKVTFDRLQVLDDHYRDVLKEMKAKASTVKAKLLSVEEACKLTPPHSARSKFGYGAKDVRNLSSKAVNHIRSVWKDLLEDTETPIDTTIMAKNEVFCVQPEKGGRKPARLIVFPDLGVRVCEKMALYDVVSTLPQAVMGSSYGFQYSPGQRVEFLVNAWKAKKCPMGFAYDTRCFDSTVTENDIRVEESIYQCCDLAPEARQAIRSLTERLYIGGPLTNSKGQNCGYRRCRASGVLTTSCGNTLTCYLKAAAACRAAKLQDCTMLVCGDDLVVICESAGTQEDEASLRAFTEAMTRYSAPPGDPPKPEYDLELITSCSSNVSVAHDASGKRVYYLTRDPTTPLARAAWETARHTPVNSWLGNIIMYAPTPWARMILMTHFFSILLAQEQLEKTLDCQIYGACYSIEPLDLPQIIQRLHGLSAFSLHSYSPGEANRVTSCLRKLGIPPLRVWRHRARSVRARLLSQGGRAATCGKYLFNWAVRTKLKLTPIPAASQLDLSSWFVAGYSGGDIYHSLSRARPRWFMWCLLLLSVGVGIYLLPNR

SEQ ID NO: 432 - protein, 591 aa, Artificial Sequence
  Synthetic peptide
SMSYTWTGALITPCAAEETKLPINALSNSLLRHHNLVYATTSRSASLRQKKVTFDRLQVLDDHYRDVLKEMKAKASTVKAKLLSVEEACKLTPPHSARSKFGYGAKDVRNLSSKAVNHIRSVWKDLLEDTETPIDTTIMAKNEVFCVQPEKGGRKPARLIVFPDLGVRVCEKMALYDVVSTLPQAVMGSSYGFQYSPGQRVEFLVNAWKAKKCPMGFAYDTRCFDSTVTENDIRVEESIYQCCDLAPEARQAIRSLTERLYIGGPLTNSKGQNCGYRRCRASGVLTTSCGNTLTCYLKAAAACRAAKLQDCTMLVCGDDLVVICESAGTQEDEASLRAFTEAMTRYSAPPGDPPKPEYDLELITSCSSNVSVAHDASGKRVYYLTRDPTTPLARAAWETARHTPVNSWLGNIIMYAPTPWARMILMTHFFSILLAQEQLEKTLDCQIYGACYSIEPLDLPQIIQRLHGLSAFSLHSYSPGEANRVSSCLRKLGIPPLRVWRHRARSVRARLLSQGGRAATCGKYLFNWAVRTKLKLTPIPAASQLDLSSWFVAGYSGGDIYHSLSRARPRWFMWCLLLLSVGVGIYLLPNR

SEQ ID NO: 433 - protein, 591 aa, Artificial Sequence
  Synthetic peptide
SMSYTWTGALITPCAAEETKLPINALSNSLLRHHNLVYATTSRSASLRQKKVTFDRLQVLDDHYRDVLKEMKAKASTVKAKLLSVEEACKLTPPHSARSKFGYGAKDVRNLSSKAVNHIRSVWKDLLEDTETPIDTTIMAKNEVFCVQPEKGGRKPARLIVFPDLGVRVCEKMALYDVVSTLPQAVMGSSYGFQYSPGQRVEFLVNAWKAKKCPMGFAYDTRCFDSTVTENDIRVEESIYQCCDLAPEARQAIRSLTERLYIGGPLTNSKGQNCGYRRCRASGVLTTSCGNTLTCYLKAAAACRAAKLQDCTMLVCGDDLVVICESAGTQEDEASLRAFTEAMTRYSAPPGDPPKPEYDLELITSCSSNVSVAHDASGKRVYYLTRDPTTPLARAAWETARHTPVNSWLGNIIMYAPTPWARAILMTHFFSILLAQEQLEKTLDCQIYGACYSIEPLDLPQIIQRLHGLSAFSLHSYSPGEANRVASCLRKLGVPPLRVWRHRARSVRARLLSQGGRAATCGKYLFNWAVRTKLKLTPIPAASQLDLSSWFVAGYSGGDIYHSLSRARPRWFMWCLLLLSVGVGIYLLPNR

SEQ ID NO: 434 - protein, 591 aa, Artificial Sequence
  Synthetic peptide
SMSYTWTGALITPCAAEETKLPINALSNSLLRHHNLVYATTSRSASLRQKKVTFDRLQVLDDHYRDVLKEMKAKASTVKAKLLSVEEACKLTPPHSARSKFGYGAKDVRNLSSKAVNHIRSVWKDLLEDTETPIDTTIMAKNEVFCVQPEKGGRKPARLIVFPDLGVRVCEKMALYDVVSTLPQAVMGSSYGFQYSPGQRVEFLVNAWKAKKCPMGFAYDTRCFDSTVTENDIRVEESIYQCCDLAPEARQAIRSLTERLYIGGPLTNSKGQNCGYRRCRASGVLTTSCGNTLTCYLKAAAACRAAKLQDCTMLVCGDDLVVICESAGTQEDEASLRAFTEAMTRYSAPPGDPPKPEYDLELITSCSSNVSVAHDASGKRVYYLTRDPTTPLARAAWETARHTPVNSWLGNIIMYAPTPWARAILMTHFFSILLAQEQLEKTLDCQIYGACYSIEPLDLPQIIQRLHGLSAFSLHSYSPGEANRVVSCLRKLGVPPLRVWRHRARSVRARLLSQGGRAATCGKYLFNWAVRTKLKLTPIPAASQLDLSSWFVAGYSGGDIYHSLSRARPRWFMWCLLLLSVGVGIYLLPNR

SEQ ID NO: 435 - protein, 591 aa, Artificial Sequence
  Synthetic peptide
SMSYTWTGALITPCAAEETKLPINALSNSLLRHHNLVYATTSRSASLRQKKVTFDRLQVLDDHYRDVLKEMKAKASTVKAKLLSVEEACKLTPPHSARSKFGYGAKDVRNLSSKAVNHIRSVWKDLLEDTETPIDTTIMAKNEVFCVQPEKGGRKPARLIVFPDLGVRVCEKMALYDVVSTLPQAVMGSSYGFQYSPGQRVEFLVNAWKAKKCPMGFAYDTRCFDSTVTENDIRVEESIYQCCDLAPEARQAIRSLTERLYIGGPLTNSKGQNCGYRRCRASGVLTTSCGNTLTCYLKAAAACRAAKLQDCTMLVCGDDLVVICESAGTQEDEASLRAFTEAMTRYSAPPGDPPKPEYDLELITSCSSNVSVAHDASGKRVYYLTRDPTTPLARAAWETARHTPVNSWLGNIIMYAPTPWARAILMTHFFSILLAQEQLEKTLDCQIYGACYSIEPLDLPQIIQRLHGLSAFSLHSYSPGEANRVISCLRKLGVPPLRVWRHRARSVRARLLSQGGRAATCGKYLFNWAVRTKLKLTPIPAASQLDLSSWFVAGYSGGDIYHSLSRARPRWFMWCLLLLSVGVGIYLLPNR

SEQ ID NO: 436 - protein, 591 aa, Artificial Sequence
  Synthetic peptide
SMSYTWTGALITPCAAEETKLPINALSNSLLRHHNLVYATTSRSASLRQKKVTFDRLQVLDDHYRDVLKEMKAKASTVKAKLLSVEEACKLTPPHSARSKFGYGAKDVRNLSSKAVNHIRSVWKDLLEDTETPIDTTIMAKNEVFCVQPEKGGRKPARLIVFPDLGVRVCEKMALYDVVSTLPQAVMGSSYGFQYSPGQRVEFLVNAWKAKKCPMGFAYDTRCFDSTVTENDIRVEESIYQCCDLAPEARQAIRSLTERLYIGGPLTNSKGQNCGYRRCRASGVLTTSCGNTLTCYLKAAAACRAAKLQDCTMLVCGDDLVVICESAGTQEDEASLRAFTEAMTRYSAPPGDPPKPEYDLELITSCSSNVSVAHDASGKRVYYLTRDPTTPLARAAWETARHTPVNSWLGNIIMYAPTPWARAILMTHFFSILLAQEQLEKTLDCQIYGACYSIEPLDLPQIIQRLHGLSAFSLHSYSPGEANRVTSCLRKLGVPPLRVWRHRARSVRARLLSQGGRAATCGKYLFNWAVRTKLKLTPIPAASQLDLSSWFVAGYSGGDIYHSLSRARPRWFMWCLLLLSVGVGIYLLPNR

SEQ ID NO: 437 - protein, 591 aa, Artificial Sequence
  Synthetic peptide
SMSYTWTGALITPCAAEETKLPINALSNSLLRHHNLVYATTSRSASLRQKKVTFDRLQVLDDHYRDVLKEMKAKASTVKAKLLSVEEACKLTPPHSARSKFGYGAKDVRNLSSKAVNHIRSVWKDLLEDTETPIDTTIMAKNEVFCVQPEKGGRKPARLIVFPDLGVRVCEKMALYDVVSTLPQAVMGSSYGFQYSPGQRVEFLVNAWKAKKCPMGFAYDTRCFDSTVTENDIRVEESIYQCCDLAPEARQAIRSLTERLYIGGPLTNSKGQNCGYRRCRASGVLTTSCGNTLTCYLKAAAACRAAKLQDCTMLVCGDDLVVICESAGTQEDEASLRAFTEAMTRYSAPPGDPPKPEYDLELITSCSSNVSVAHDASGKRVYYLTRDPTTPLARAAWETARHTPVNSWLGNIIMYAPTPWARAILMTHFFSILLAQEQLEKTLDCQIYGACYSIEPLDLPQIIQRLHGLSAFSLHSYSPGEANRVSSCLRKLGVPPLRVWRHRARSVRARLLSQGGRAATCGKYLFNWAVRTKLKLTPIPAASQLDLSSWFVAGYSGGDIYHSLSRARPRWFMWCLLLLSVGVGIYLLPNR

SEQ ID NO: 438 - protein, 591 aa, Artificial Sequence
  Synthetic peptide
SMSYTWTGALITPCAAEETKLPINALSNSLLRHHNLVYATTSRSASLRQKKVTFDRLQVLDDHYRDVLKEMKAKASTVKAKLLSVEEACKLTPPHSARSKFGYGAKDVRNLSSKAVNHIRSVWKDLLEDTETPIDTTIMAKNEVFCVQPEKGGRKPARLIVFPDLGVRVCEKMALYDVVSTLPQAVMGSSYGFQYSPGQRVEFLVNAWKAKKCPMGFAYDTRCFDSTVTENDIRVEESIYQCCDLAPEARQAIRSLTERLYIGGPLTNSKGQNCGYRRCRASGVLTTSCGNTLTCYLKAAAACRAAKLQDCTMLVCGDDLVVICESAGTQEDEASLRAFTEAMTRYSAPPGDPPKPEYDLELITSCSSNVSVAHDASGKRVYYLTRDPTTPLARAAWETARHTPVNSWLGNIIMYAPTPWARAILMTHFFSILLAQEQLEKTLDCQIYGACYSIEPLDLPQIIQRLHGLSAFSLHSYSPGEANRVASCLRKLGIPPLRVWRHRARSVRARLLSQGGRAATCGKYLFNWAVRTKLKLTPIPAASQLDLSSWFVAGYSGGDIYHSLSRARPRWFMWCLLLLSVGVGIYLLPNR

SEQ ID NO: 439 - protein, 591 aa, Artificial Sequence
  Synthetic peptide
SMSYTWTGALITPCAAEETKLPINALSNSLLRHHNLVYATTSRSASLRQKKVTFDRLQVLDDHYRDVLKEMKAKASTVKAKLLSVEEACKLTPPHSARSKFGYGAKDVRNLSSKAVNHIRSVWKDLLEDTETPIDTTIMAKNEVFCVQPEKGGRKPARLIVFPDLGVRVCEKMALYDVVSTLPQAVMGSSYGFQYSPGQRVEFLVNAWKAKKCPMGFAYDTRCFDSTVTENDIRVEESIYQCCDLAPEARQAIRSLTERLYIGGPLTNSKGQNCGYRRCRASGVLTTSCGNTLTCYLKAAAACRAAKLQDCTMLVCGDDLVVICESAGTQEDEASLRAFTEAMTRYSAPPGDPPKPEYDLELITSCSSNVSVAHDASGKRVYYLTRDPTTPLARAAWETARHTPVNSWLGNIIMYAPTPWARAILMTHFFSILLAQEQLEKTLDCQIYGACYSIEPLDLPQIIQRLHGLSAFSLHSYSPGEANRVVSCLRKLGIPPLRVWRHRARSVRARLLSQGGRAATCGKYLFNWAVRTKLKLTPIPAASQLDLSSWFVAGYSGGDIYHSLSRARPRWFMWCLLLLSVGVGIYLLPNR

SEQ ID NO: 440 - protein, 591 aa, Artificial Sequence
  Synthetic peptide
SMSYTWTGALITPCAAEETKLPINALSNSLLRHHNLVYATTSRSASLRQKKVTFDRLQVLDDHYRDVLKEMKAKASTVKAKLLSVEEACKLTPPHSARSKFGYGAKDVRNLSSKAVNHIRSVWKDLLEDTETPIDTTIMAKNEVFCVQPEKGGRKPARLIVFPDLGVRVCEKMALYDVVSTLPQAVMGSSYGFQYSPGQRVEFLVNAWKAKKCPMGFAYDTRCFDSTVTENDIRVEESIYQCCDLAPEARQAIRSLTERLYIGGPLTNSKGQNCGYRRCRASGVLTTSCGNTLTCYLKAAAACRAAKLQDCTMLVCGDDLVVICESAGTQEDEASLRAFTEAMTRYSAPPGDPPKPEYDLELITSCSSNVSVAHDASGKRVYYLTRDPTTPLARAAWETARHTPVNSWLGNIIMYAPTPWARAILMTHFFSILLAQEQLEKTLDCQIYGACYSIEPLDLPQIIQRLHGLSAFSLHSYSPGEANRVISCLRKLGIPPLRVWRHRARSVRARLLSQGGRAATCGKYLFNWAVRTKLKLTPIPAASQLDLSSWFVAGYSGGDIYHSLSRARPRWFMWCLLLLSVGVGIYLLPNR

SEQ ID NO: 441 - protein, 591 aa, Artificial Sequence
  Synthetic peptide
SMSYTWTGALITPCAAEETKLPINALSNSLLRHHNLVYATTSRSASLRQKKVTFDRLQVLDDHYRDVLKEMKAKASTVKAKLLSVEEACKLTPPHSARSKFGYGAKDVRNLSSKAVNHIRSVWKDLLEDTETPIDTTIMAKNEVFCVQPEKGGRKPARLIVFPDLGVRVCEKMALYDVVSTLPQAVMGSSYGFQYSPGQRVEFLVNAWKAKKCPMGFAYDTRCFDSTVTENDIRVEESIYQCCDLAPEARQAIRSLTERLYIGGPLTNSKGQNCGYRRCRASGVLTTSCGNTLTCYLKAAAACRAAKLQDCTMLVCGDDLVVICESAGTQEDEASLRAFTEAMTRYSAPPGDPPKPEYDLELITSCSSNVSVAHDASGKRVYYLTRDPTTPLARAAWETARHTPVNSWLGNIIMYAPTPWARAILMTHFFSILLAQEQLEKTLDCQIYGACYSIEPLDLPQIIQRLHGLSAFSLHSYSPGEANRVTSCLRKLGIPPLRVWRHRARSVRARLLSQGGRAATCGKYLFNWAVRTKLKLTPIPAASQLDLSSWFVAGYSGGDIYHSLSRARPRWFMWCLLLLSVGVGIYLLPNR

SEQ ID NO: 442 - protein, 591 aa, Artificial Sequence
  Synthetic peptide
SMSYTWTGALITPCAAEETKLPINALSNSLLRHHNLVYATTSRSASLRQKKVTFDRLQVLDDHYRDVLKEMKAKASTVKAKLLSVEEACKLTPPHSARSKFGYGAKDVRNLSSKAVNHIRSVWKDLLEDTETPIDTTIMAKNEVFCVQPEKGGRKPARLIVFPDLGVRVCEKMALYDVVSTLPQAVMGSSYGFQYSPGQRVEFLVNAWKAKKCPMGFAYDTRCFDSTVTENDIRVEESIYQCCDLAPEARQAIRSLTERLYIGGPLTNSKGQNCGYRRCRASGVLTTSCGNTLTCYLKAAAACRAAKLQDCTMLVCGDDLVVICESAGTQEDEASLRAFTEAMTRYSAPPGDPPKPEYDLELITSCSSNVSVAHDASGKRVYYLTRDPTTPLARAAWETARHTPVNSWLGNIIMYAPTPWARAILMTHFFSILLAQEQLEKTLDCQIYGACYSIEPLDLPQIIQRLHGLSAFSLHSYSPGEANRVSSCLRKLGIPPLRVWRHRARSVRARLLSQGGRAATCGKYLFNWAVRTKLKLTPIPAASQLDLSSWFVAGYSGGDIYHSLSRARPRWFMWCLLLLSVGVGIYLLPNR

SEQ ID NO: 443 - protein, 591 aa, Artificial Sequence
  Sythetic peptide
SMSYTWTGALITPCAAEETKLPINALSNSLLRHHNLVYATTSRSASLRQKKVTFDRLQVLDDHYRDVLKEMKAKASTVKAKLLSVEEACKLTPPHSARSKFGYGAKDVRNLSSKAVNHIRSVWKDLLEDTETPIDTTIMAKNEVFCVQPEKGGRKPARLIVFPDLGVRVCEKMALYDVVSTLPQAVMGSSYGFQYSPGQRVEFLVNAWKAKKCPMGFAYDTRCFDSTVTENDIRVEESIYQCCDLAPEARQAIRSLTERLYIGGPLTNSKGQNCGYRRCRASGVLTTSCGNTLTCYLKAAAACRAAKLQDCTMLVCGDDLVVICESAGTQEDEASLRAFTEAMTRYSAPPGDPPKPEYDLELITSCSSNVSVAHDASGKRVYYLTRDPTTPLARAAWETARHTPVNSWLGNIIMYAPTPWARMILMTHFFSILLAQEQLEKTLDCQIYGACYSIEPLDLPQIIQRLHGLSAFSLHSYSPGETNRVASCLRKLGVPPLRVWRHRARSVRARLLSQGGRAATCGKYLFNWAVRTKLKLTPIPAASQLDLSSWFVAGYSGGDIYHSLSRARPRWFMWCLLLLSVGVGIYLLPNR

SEQ ID NO: 444 - protein, 591 aa, Artificial Sequence
  Synthetic peptide
SMSYTWTGALITPCAAEETKLPINALSNSLLRHHNLVYATTSRSASLRQKKVTFDRLQVLDDHYRDVLKEMKAKASTVKAKLLSVEEACKLTPPHSARSKFGYGAKDVRNLSSKAVNHIRSVWKDLLEDTETPIDTTIMAKNEVFCVQPEKGGRKPARLIVFPDLGVRVCEKMALYDVVSTLPQAVMGSSYGFQYSPGQRVEFLVNAWKAKKCPMGFAYDTRCFDSTVTENDIRVEESIYQCCDLAPEARQAIRSLTERLYIGGPLTNSKGQNCGYRRCRASGVLTTSCGNTLTCYLKAAAACRAAKLQDCTMLVCGDDLVVICESAGTQEDEASLRAFTEAMTRYSAPPGDPPKPEYDLELITSCSSNVSVAHDASGKRVYYLTRDPTTPLARAAWETARHTPVNSWLGNIIMYAPTPWARMILMTHFFSILLAQEQLEKTLDCQIYGACYSIEPLDLPQIIQRLHGLSAFSLHSYSPGETNRVVSCLRKLGVPPLRVWRHRARSVRARLLSQGGRAATCGKYLFNWAVRTKLKLTPIPAASQLDLSSWFVAGYSGGDIYHSLSRARPRWFMWCLLLLSVGVGIYLLPNR

SEQ ID NO: 445 - protein, 591 aa, Artificial Sequence
  Synthetic peptide
SMSYTWTGALITPCAAEETKLPINALSNSLLRHHNLVYATTSRSASLRQKKVTFDRLQVLDDHYRDVLKEMKAKASTVKAKLLSVEEACKLTPPHSARSKFGYGAKDVRNLSSKAVNHIRSVWKDLLEDTETPIDTTIMAKNEVFCVQPEKGGRKPARLIVFPDLGVRVCEKMALYDVVSTLPQAVMGSSYGFQYSPGQRVEFLVNAWKAKKCPMGFAYDTRCFDSTVTENDIRVEESIYQCCDLAPEARQAIRSLTERLYIGGPLTNSKGQNCGYRRCRASGVLTTSCGNTLTCYLKAAAACRAAKLQDCTMLVCGDDLVVICESAGTQEDEASLRAFTEAMTRYSAPPGDPPKPEYDLELITSCSSNVSVAHDASGKRVYYLTRDPTTPLARAAWETARHTPVNSWLGNIIMYAPTPWARMILMTHFFSILLAQEQLEKTLDCQIYGACYSIEPLDLPQIIQRLHGLSAFSLHSYSPGETNRVISCLRKLGVPPLRVWRHRARSVRARLLSQGGRAATCGKYLFNWAVRTKLKLTPIPAASQLDLSSWFVAGYSGGDIYHSLSRARPRWFMWCLLLLSVGVGIYLLPNR

SEQ ID NO: 446 - protein, 591 aa, Artificial Sequence
  Synthetic peptid
SMSYTWTGALITPCAAEETKLPINALSNSLLRHHNLVYATTSRSASLRQKKVTFDRLQVLDDHYRDVLKEMKAKASTVKAKLLSVEEACKLTPPHSARSKFGYGAKDVRNLSSKAVNHIRSVWKDLLEDTETPIDTTIMAKNEVFCVQPEKGGRKPARLIVFPDLGVRVCEKMALYDVVSTLPQAVMGSSYGFQYSPGQRVEFLVNAWKAKKCPMGFAYDTRCFDSTVTENDIRVEESIYQCCDLAPEARQAIRSLTERLYIGGPLTNSKGQNCGYRRCRASGVLTTSCGNTLTCYLKAAAACRAAKLQDCTMLVCGDDLVVICESAGTQEDEASLRAFTEAMTRYSAPPGDPPKPEYDLELITSCSSNVSVAHDASGKRVYYLTRDPTTPLARAAWETARHTPVNSWLGNIIMYAPTPWARMILMTHFFSILLAQEQLEKTLDCQIYGACYSIEPLDLPQIIQRLHGLSAFSLHSYSPGETNRVTSCLRKLGVPPLRVWRHRARSVRARLLSQGGRAATCGKYLFNWAVRTKLKLTPIPAASQLDLSSWFVAGYSGGDIYHSLSRARPRWFMWCLLLLSVGVGIYLLPNR

SEQ ID NO: 447 - protein, 591 aa, Artificial Sequence
  Synthetic peptide
SMSYTWTGALITPCAAEETKLPINALSNSLLRHHNLVYATTSRSASLRQKKVTFDRLQVLDDHYRDVLKEMKAKASTVKAKLLSVEEACKLTPPHSARSKFGYGAKDVRNLSSKAVNHIRSVWKDLLEDTETPIDTTIMAKNEVFCVQPEKGGRKPARLIVFPDLGVRVCEKMALYDVVSTLPQAVMGSSYGFQYSPGQRVEFLVNAWKAKKCPMGFAYDTRCFDSTVTENDIRVEESIYQCCDLAPEARQAIRSLTERLYIGGPLTNSKGQNCGYRRCRASGVLTTSCGNTLTCYLKAAAACRAAKLQDCTMLVCGDDLVVICESAGTQEDEASLRAFTEAMTRYSAPPGDPPKPEYDLELITSCSSNVSVAHDASGKRVYYLTRDPTTPLARAAWETARHTPVNSWLGNIIMYAPTPWARMILMTHFFSILLAQEQLEKTLDCQIYGACYSIEPLDLPQIIQRLHGLSAFSLHSYSPGETNRVSSCLRKLGVPPLRVWRHRARSVRARLLSQGGRAATCGKYLFNWAVRTKLKLTPIPAASQLDLSSWFVAGYSGGDIYHSLSRARPRWFMWCLLLLSVGVGIYLLPNR

SEQ ID NO: 448 - protein, 591 aa, Artificial Sequence
  Synthetic peptide
SMSYTWTGALITPCAAEETKLPINALSNSLLRHHNLVYATTSRSASLRQKKVTFDRLQVLDDHYRDVLKEMKAKASTVKAKLLSVEEACKLTPPHSARSKFGYGAKDVRNLSSKAVNHIRSVWKDLLEDTETPIDTTIMAKNEVFCVQPEKGGRKPARLIVFPDLGVRVCEKMALYDVVSTLPQAVMGSSYGFQYSPGQRVEFLVNAWKAKKCPMGFAYDTRCFDSTVTENDIRVEESIYQCCDLAPEARQAIRSLTERLYIGGPLTNSKGQNCGYRRCRASGVLTTSCGNTLTCYLKAAAACRAAKLQDCTMLVCGDDLVVICESAGTQEDEASLRAFTEAMTRYSAPPGDPPKPEYDLELITSCSSNVSVAHDASGKRVYYLTRDPTTPLARAAWETARHTPVNSWLGNIIMYAPTPWARMILMTHFFSILLAQEQLEKTLDCQIYGACYSIEPLDLPQIIQRLHGLSAFSLHSYSPGETNRVASCLRKLGIPPLRVWRHRARSVRARLLSQGGRAATCGKYLFNWAVRTKLKLTPIPAASQLDLSSWFVAGYSGGDIYHSLSRARPRWFMWCLLLLSVGVGIYLLPNR

SEQ ID NO: 449 - protein, 591 aa, Artificial Sequence
  Synthetic peptide
SMSYTWTGALITPCAAEETKLPINALSNSLLRHHNLVYATTSRSASLRQKKVTFDRLQVLDDHYRDVLKEMKAKASTVKAKLLSVEEACKLTPPHSARSKFGYGAKDVRNLSSKAVNHIRSVWKDLLEDTETPIDTTIMAKNEVFCVQPEKGGRKPARLIVFPDLGVRVCEKMALYDVVSTLPQAVMGSSYGFQYSPGQRVEFLVNAWKAKKCPMGFAYDTRCFDSTVTENDIRVEESIYQCCDLAPEARQAIRSLTERLYIGGPLTNSKGQNCGYRRCRASGVLTTSCGNTLTCYLKAAAACRAAKLQDCTMLVCGDDLVVICESAGTQEDEASLRAFTEAMTRYSAPPGDPPKPEYDLELITSCSSNVSVAHDASGKRVYYLTRDPTTPLARAAWETARHTPVNSWLGNIIMYAPTPWARMILMTHFFSILLAQEQLEKTLDCQIYGACYSIEPLDLPQIIQRLHGLSAFSLHSYSPGETNRVVSCLRKLGIPPLRVWRHRARSVRARLLSQGGRAATCGKYLFNWAVRTKLKLTPIPAASQLDLSSWFVAGYSGGDIYHSLSRARPRWFMWCLLLLSVGVGIYLLPNR

SEQ ID NO: 450 - protein, 591 aa, Artificial Sequence
  Synthetic peptide
SMSYTWTGALITPCAAEETKLPINALSNSLLRHHNLVYATTSRSASLRQKKVTFDRLQVLDDHYRDVLKEMKAKASTVKAKLLSVEEACKLTPPHSARSKFGYGAKDVRNLSSKAVNHIRSVWKDLLEDTETPIDTTIMAKNEVFCVQPEKGGRKPARLIVFPDLGVRVCEKMALYDVVSTLPQAVMGSSYGFQYSPGQRVEFLVNAWKAKKCPMGFAYDTRCFDSTVTENDIRVEESIYQCCDLAPEARQAIRSLTERLYIGGPLTNSKGQNCGYRRCRASGVLTTSCGNTLTCYLKAAAACRAAKLQDCTMLVCGDDLVVICESAGTQEDEASLRAFTEAMTRYSAPPGDPPKPEYDLELITSCSSNVSVAHDASGKRVYYLTRDPTTPLARAAWETARHTPVNSWLGNIIMYAPTPWARMILMTHFFSILLAQEQLEKTLDCQIYGACYSIEPLDLPQIIQRLHGLSAFSLHSYSPGETNRVISCLRKLGIPPLRVWRHRARSVRARLLSQGGRAATCGKYLFNWAVRTKLKLTPIPAASQLDLSSWFVAGYSGGDIYHSLSRARPRWFMWCLLLLSVGVGIYLLPNR

SEQ ID NO: 451 - protein, 591 aa, Artificial Sequence
  Synthetic peptide
SMSYTWTGALITPCAAEETKLPINALSNSLLRHHNLVYATTSRSASLRQKKVTFDRLQVLDDHYRDVLKEMKAKASTVKAKLLSVEEACKLTPPHSARSKFGYGAKDVRNLSSKAVNHIRSVWKDLLEDTETPIDTTIMAKNEVFCVQPEKGGRKPARLIVFPDLGVRVCEKMALYDVVSTLPQAVMGSSYGFQYSPGQRVEFLVNAWKAKKCPMGFAYDTRCFDSTVTENDIRVEESIYQCCDLAPEARQAIRSLTERLYIGGPLTNSKGQNCGYRRCRASGVLTTSCGNTLTCYLKAAAACRAAKLQDCTMLVCGDDLVVICESAGTQEDEASLRAFTEAMTRYSAPPGDPPKPEYDLELITSCSSNVSVAHDASGKRVYYLTRDPTTPLARAAWETARHTPVNSWLGNIIMYAPTPWARMILMTHFFSILLAQEQLEKTLDCQIYGACYSIEPLDLPQIIQRLHGLSAFSLHSYSPGETNRVTSCLRKLGIPPLRVWRHRARSVRARLLSQGGRAATCGKYLFNWAVRTKLKLTPIPAASQLDLSSWFVAGYSGGDIYHSLSRARPRWFMWCLLLLSVGVGIYLLPNR

SEQ ID NO: 452 - protein, 591 aa, Artificial Sequence
  Synthetic peptide
SMSYTWTGALITPCAAEETKLPINALSNSLLRHHNLVYATTSRSASLRQKKVTFDRLQVLDDHYRDVLKEMKAKASTVKAKLLSVEEACKLTPPHSARSKFGYGAKDVRNLSSKAVNHIRSVWKDLLEDTETPIDTTIMAKNEVFCVQPEKGGRKPARLIVFPDLGVRVCEKMALYDVVSTLPQAVMGSSYGFQYSPGQRVEFLVNAWKAKKCPMGFAYDTRCFDSTVTENDIRVEESIYQCCDLAPEARQAIRSLTERLYIGGPLTNSKGQNCGYRRCRASGVLTTSCGNTLTCYLKAAAACRAAKLQDCTMLVCGDDLVVICESAGTQEDEASLRAFTEAMTRYSAPPGDPPKPEYDLELITSCSSNVSVAHDASGKRVYYLTRDPTTPLARAAWETARHTPVNSWLGNIIMYAPTPWARMILMTHFFSILLAQEQLEKTLDCQIYGACYSIEPLDLPQIIQRLHGLSAFSLHSYSPGETNRVSSCLRKLGIPPLRVWRHRARSVRARLLSQGGRAATCGKYLFNWAVRTKLKLTPIPAASQLDLSSWFVAGYSGGDIYHSLSRARPRWFMWCLLLLSVGVGIYLLPNR

SEQ ID NO: 453 - protein, 591 aa, Artificial Sequence
  Synthetic peptide
SMSYTWTGALITPCAAEETKLPINALSNSLLRHHNLVYATTSRSASLRQKKVTFDRLQVLDDHYRDVLKEMKAKASTVKAKLLSVEEACKLTPPHSARSKFGYGAKDVRNLSSKAVNHIRSVWKDLLEDTETPIDTTIMAKNEVFCVQPEKGGRKPARLIVFPDLGVRVCEKMALYDVVSTLPQAVMGSSYGFQYSPGQRVEFLVNAWKAKKCPMGFAYDTRCFDSTVTENDIRVEESIYQCCDLAPEARQAIRSLTERLYIGGPLTNSKGQNCGYRRCRASGVLTTSCGNTLTCYLKAAAACRAAKLQDCTMLVCGDDLVVICESAGTQEDEASLRAFTEAMTRYSAPPGDPPKPEYDLELITSCSSNVSVAHDASGKRVYYLTRDPTTPLARAAWETARHTPVNSWLGNIIMYAPTPWARAILMTHFFSILLAQEQLEKTLDCQIYGACYSIEPLDLPQIIQRLHGLSAFSLHSYSPGETNRVASCLRKLGVPPLRVWRHRARSVRARLLSQGGRAATCGKYLFNWAVRTKLKLTPIPAASQLDLSSWFVAGYSGGDIYHSLSRARPRWFMWCLLLLSVGVGIYLLPNR

SEQ ID NO: 454 - protein, 591 aa, Artificial Sequence
  Synthetic peptide
SMSYTWTGALITPCAAEETKLPINALSNSLLRHHNLVYATTSRSASLRQKKVTFDRLQVLDDHYRDVLKEMKAKASTVKAKLLSVEEACKLTPPHSARSKFGYGAKDVRNLSSKAVNHIRSVWKDLLEDTETPIDTTIMAKNEVFCVQPEKGGRKPARLIVFPDLGVRVCEKMALYDVVSTLPQAVMGSSYGFQYSPGQRVEFLVNAWKAKKCPMGFAYDTRCFDSTVTENDIRVEESIYQCCDLAPEARQAIRSLTERLYIGGPLTNSKGQNCGYRRCRASGVLTTSCGNTLTCYLKAAAACRAAKLQDCTMLVCGDDLVVICESAGTQEDEASLRAFTEAMTRYSAPPGDPPKPEYDLELITSCSSNVSVAHDASGKRVYYLTRDPTTPLARAAWETARHTPVNSWLGNIIMYAPTPWARAILMTHFFSILLAQEQLEKTLDCQIYGACYSIEPLDLPQIIQRLHGLSAFSLHSYSPGETNRVVSCLRKLGVPPLRVWRHRARSVRARLLSQGGRAATCGKYLFNWAVRTKLKLTPIPAASQLDLSSWFVAGYSGGDIYHSLSRARPRWFMWCLLLLSVGVGIYLLPNR

SEQ ID NO: 455 - protein, 591 aa, Artificial Sequence
  Synthetic peptide
SMSYTWTGALITPCAAEETKLPINALSNSLLRHHNLVYATTSRSASLRQKKVTFDRLQVLDDHYRDVLKEMKAKASTVKAKLLSVEEACKLTPPHSARSKFGYGAKDVRNLSSKAVNHIRSVWKDLLEDTETPIDTTIMAKNEVFCVQPEKGGRKPARLIVFPDLGVRVCEKMALYDVVSTLPQAVMGSSYGFQYSPGQRVEFLVNAWKAKKCPMGFAYDTRCFDSTVTENDIRVEESIYQCCDLAPEARQAIRSLTERLYIGGPLTNSKGQNCGYRRCRASGVLTTSCGNTLTCYLKAAAACRAAKLQDCTMLVCGDDLVVICESAGTQEDEASLRAFTEAMTRYSAPPGDPPKPEYDLELITSCSSNVSVAHDASGKRVYYLTRDPTTPLARAAWETARHTPVNSWLGNIIMYAPTPWARAILMTHFFSILLAQEQLEKTLDCQIYGACYSIEPLDLPQIIQRLHGLSAFSLHSYSPGETNRVISCLRKLGVPPLRVWRHRARSVRARLLSQGGRAATCGKYLFNWAVRTKLKLTPIPAASQLDLSSWFVAGYSGGDIYHSLSRARPRWFMWCLLLLSVGVGIYLLPNR

SEQ ID NO: 456 - protein, 591 aa, Artificial Sequence
  Synthetic peptide
SMSYTWTGALITPCAAEETKLPINALSNSLLRHHNLVYATTSRSASLRQKKVTFDRLQVLDDHYRDVLKEMKAKASTVKAKLLSVEEACKLTPPHSARSKFGYGAKDVRNLSSKAVNHIRSVWKDLLEDTETPIDTTIMAKNEVFCVQPEKGGRKPARLIVFPDLGVRVCEKMALYDVVSTLPQAVMGSSYGFQYSPGQRVEFLVNAWKAKKCPMGFAYDTRCFDSTVTENDIRVEESIYQCCDLAPEARQAIRSLTERLYIGGPLTNSKGQNCGYRRCRASGVLTTSCGNTLTCYLKAAAACRAAKLQDCTMLVCGDDLVVICESAGTQEDEASLRAFTEAMTRYSAPPGDPPKPEYDLELITSCSSNVSVAHDASGKRVYYLTRDPTTPLARAAWETARHTPVNSWLGNIIMYAPTPWARAILMTHFFSILLAQEQLEKTLDCQIYGACYSIEPLDLPQIIQRLHGLSAFSLHSYSPGETNRVTSCLRKLGVPPLRVWRHRARSVRARLLSQGGRAATCGKYLFNWAVRTKLKLTPIPAASQLDLSSWFVAGYSGGDIYHSLSRARPRWFMWCLLLLSVGVGIYLLPNR

SEQ ID NO: 457 - protein, 591 aa, Artificial Sequence
  Synthetic peptid
SMSYTWTGALITPCAAEETKLPINALSNSLLRHHNLVYATTSRSASLRQKKVTFDRLQVLDDHYRDVLKEMKAKASTVKAKLLSVEEACKLTPPHSARSKFGYGAKDVRNLSSKAVNHIRSVWKDLLEDTETPIDTTIMAKNEVFCVQPEKGGRKPARLIVFPDLGVRVCEKMALYDVVSTLPQAVMGSSYGFQYSPGQRVEFLVNAWKAKKCPMGFAYDTRCFDSTVTENDIRVEESIYQCCDLAPEARQAIRSLTERLYIGGPLTNSKGQNCGYRRCRASGVLTTSCGNTLTCYLKAAAACRAAKLQDCTMLVCGDDLVVICESAGTQEDEASLRAFTEAMTRYSAPPGDPPKPEYDLELITSCSSNVSVAHDASGKRVYYLTRDPTTPLARAAWETARHTPVNSWLGNIIMYAPTPWARAILMTHFFSILLAQEQLEKTLDCQIYGACYSIEPLDLPQIIQRLHGLSAFSLHSYSPGETNRVSSCLRKLGVPPLRVWRHRARSVRARLLSQGGRAATCGKYLFNWAVRTKLKLTPIPAASQLDLSSWFVAGYSGGDIYHSLSRARPRWFMWCLLLLSVGVGIYLLPNR

SEQ ID NO: 458 - protein, 591 aa, Artificial Sequence
  Synthetic peptide
SMSYTWTGALITPCAAEETKLPINALSNSLLRHHNLVYATTSRSASLRQKKVTFDRLQVLDDHYRDVLKEMKAKASTVKAKLLSVEEACKLTPPHSARSKFGYGAKDVRNLSSKAVNHIRSVWKDLLEDTETPIDTTIMAKNEVFCVQPEKGGRKPARLIVFPDLGVRVCEKMALYDVVSTLPQAVMGSSYGFQYSPGQRVEFLVNAWKAKKCPMGFAYDTRCFDSTVTENDIRVEESIYQCCDLAPEARQAIRSLTERLYIGGPLTNSKGQNCGYRRCRASGVLTTSCGNTLTCYLKAAAACRAAKLQDCTMLVCGDDLVVICESAGTQEDEASLRAFTEAMTRYSAPPGDPPKPEYDLELITSCSSNVSVAHDASGKRVYYLTRDPTTPLARAAWETARHTPVNSWLGNIIMYAPTPWARAILMTHFFSILLAQEQLEKTLDCQIYGACYSIEPLDLPQIIQRLHGLSAFSLHSYSPGETNRVASCLRKLGIPPLRVWRHRARSVRARLLSQGGRAATCGKYLFNWAVRTKLKLTPIPAASQLDLSSWFVAGYSGGDIYHSLSRARPRWFMWCLLLLSVGVGIYLLPNR

SEQ ID NO: 459 - protein, 591 aa, Artificial Sequence
  Synthetic peptide
SMSYTWTGALITPCAAEETKLPINALSNSLLRHHNLVYATTSRSASLRQKKVTFDRLQVLDDHYRDVLKEMKAKASTVKAKLLSVEEACKLTPPHSARSKFGYGAKDVRNLSSKAVNHIRSVWKDLLEDTETPIDTTIMAKNEVFCVQPEKGGRKPARLIVFPDLGVRVCEKMALYDVVSTLPQAVMGSSYGFQYSPGQRVEFLVNAWKAKKCPMGFAYDTRCFDSTVTENDIRVEESIYQCCDLAPEARQAIRSLTERLYIGGPLTNSKGQNCGYRRCRASGVLTTSCGNTLTCYLKAAAACRAAKLQDCTMLVCGDDLVVICESAGTQEDEASLRAFTEAMTRYSAPPGDPPKPEYDLELITSCSSNVSVAHDASGKRVYYLTRDPTTPLARAAWETARHTPVNSWLGNIIMYAPTPWARAILMTHFFSILLAQEQLEKTLDCQIYGACYSIEPLDLPQIIQRLHGLSAFSLHSYSPGETNRVVSCLRKLGIPPLRVWRHRARSVRARLLSQGGRAATCGKYLFNWAVRTKLKLTPIPAASQLDLSSWFVAGYSGGDIYHSLSRARPRWFMWCLLLLSVGVGIYLLPNR

SEQ ID NO: 460 - protein, 591 aa, Artificial Sequence
  Synthetic peptide
SMSYTWTGALITPCAAEETKLPINALSNSLLRHHNLVYATTSRSASLRQKKVTFDRLQVLDDHYRDVLKEMKAKASTVKAKLLSVEEACKLTPPHSARSKFGYGAKDVRNLSSKAVNHIRSVWKDLLEDTETPIDTTIMAKNEVFCVQPEKGGRKPARLIVFPDLGVRVCEKMALYDVVSTLPQAVMGSSYGFQYSPGQRVEFLVNAWKAKKCPMGFAYDTRCFDSTVTENDIRVEESIYQCCDLAPEARQAIRSLTERLYIGGPLTNSKGQNCGYRRCRASGVLTTSCGNTLTCYLKAAAACRAAKLQDCTMLVCGDDLVVICESAGTQEDEASLRAFTEAMTRYSAPPGDPPKPEYDLELITSCSSNVSVAHDASGKRVYYLTRDPTTPLARAAWETARHTPVNSWLGNIIMYAPTPWARAILMTHFFSILLAQEQLEKTLDCQIYGACYSIEPLDLPQIIQRLHGLSAFSLHSYSPGETNRVISCLRKLGIPPLRVWRHRARSVRARLLSQGGRAATCGKYLFNWAVRTKLKLTPIPAASQLDLSSWFVAGYSGGDIYHSLSRARPRWFMWCLLLLSVGVGIYLLPNR

SEQ ID NO: 461 - protein, 591 aa, Artificial Sequence
  Synthetic peptide
SMSYTWTGALITPCAAEETKLPINALSNSLLRHHNLVYATTSRSASLRQKKVTFDRLQVLDDHYRDVLKEMKAKASTVKAKLLSVEEACKLTPPHSARSKFGYGAKDVRNLSSKAVNHIRSVWKDLLEDTETPIDTTIMAKNEVFCVQPEKGGRKPARLIVFPDLGVRVCEKMALYDVVSTLPQAVMGSSYGFQYSPGQRVEFLVNAWKAKKCPMGFAYDTRCFDSTVTENDIRVEESIYQCCDLAPEARQAIRSLTERLYIGGPLTNSKGQNCGYRRCRASGVLTTSCGNTLTCYLKAAAACRAAKLQDCTMLVCGDDLVVICESAGTQEDEASLRAFTEAMTRYSAPPGDPPKPEYDLELITSCSSNVSVAHDASGKRVYYLTRDPTTPLARAAWETARHTPVNSWLGNIIMYAPTPWARAILMTHFFSILLAQEQLEKTLDCQIYGACYSIEPLDLPQIIQRLHGLSAFSLHSYSPGETNRVTSCLRKLGIPPLRVWRHRARSVRARLLSQGGRAATCGKYLFNWAVRTKLKLTPIPAASQLDLSSWFVAGYSGGDIYHSLSRARPRWFMWCLLLLSVGVGIYLLPNR

SEQ ID NO: 462 - protein, 591 aa, Artificial Sequence
  Synthetic peptide
SMSYTWTGALITPCAAEETKLPINALSNSLLRHHNLVYATTSRSASLRQKKVTFDRLQVLDDHYRDVLKEMKAKASTVKAKLLSVEEACKLTPPHSARSKFGYGAKDVRNLSSKAVNHIRSVWKDLLEDTETPIDTTIMAKNEVFCVQPEKGGRKPARLIVFPDLGVRVCEKMALYDVVSTLPQAVMGSSYGFQYSPGQRVEFLVNAWKAKKCPMGFAYDTRCFDSTVTENDIRVEESIYQCCDLAPEARQAIRSLTERLYIGGPLTNSKGQNCGYRRCRASGVLTTSCGNTLTCYLKAAAACRAAKLQDCTMLVCGDDLVVICESAGTQEDEASLRAFTEAMTRYSAPPGDPPKPEYDLELITSCSSNVSVAHDASGKRVYYLTRDPTTPLARAAWETARHTPVNSWLGNIIMYAPTPWARAILMTHFFSILLAQEQLEKTLDCQIYGACYSIEPLDLPQIIQRLHGLSAFSLHSYSPGETNRVSSCLRKLGIPPLRVWRHRARSVRARLLSQGGRAATCGKYLFNWAVRTKLKLTPIPAASQLDLSSWFVAGYSGGDIYHSLSRARPRWFMWCLLLLSVGVGIYLLPNR

SEQ ID NO: 463 - protein, 591 aa, Artificial Sequence
  Synthetic peptide
SMSYTWTGALITPCAAEETKLPINALSNSLLRHHNLVYATTSRSASLRQKKVTFDRLQVLDDHYRDVLKEMKAKASTVKAKLLSVEEACKLTPPHSARSKFGYGAKDVRNLSSKAVNHIRSVWKDLLEDTETPIDTTIMAKNEVFCVQPEKGGRKPARLIVFPDLGVRVCEKMALYDVVSTLPQAVMGSSYGFQYSPGQRVEFLVNAWKAKKCPMGFAYDTRCFDSTVTENDIRVEESIYQCCDLAPEARQAIRSLTERLYIGGPLTNSKGQNCGYRRCRASGVLTTSCGNTLTCYLKAAAACRAAKLQDCTMLVCGDDLVVICESAGTQEDEASLRAFTEAMTRYSAPPGDPPKPEYDLELITSCSSNVSVAHDASGKRVYYLTRDPTTPLARAAWETARHTPVNSWLGNIIMYAPTPWARMILMTHFFSILLAQEQLEKTLDCQIYGACYSIEPLDLPQIIQRLHGLSAFSLHSYSPGEVNRVASCLRKLGVPPLRVWRHRARSVRARLLSQGGRAATCGKYLFNWAVRTKLKLTPIPAASQLDLSSWFVAGYSGGDIYHSLSRARPRWFMWCLLLLSVGVGIYLLPNR

SEQ ID NO: 464 - protein, 591 aa, Artificial Sequence
  Synthetic peptide
SMSYTWTGALITPCAAEETKLPINALSNSLLRHHNLVYATTSRSASLRQKKVTFDRLQVLDDHYRDVLKEMKAKASTVKAKLLSVEEACKLTPPHSARSKFGYGAKDVRNLSSKAVNHIRSVWKDLLEDTETPIDTTIMAKNEVFCVQPEKGGRKPARLIVFPDLGVRVCEKMALYDVVSTLPQAVMGSSYGFQYSPGQRVEFLVNAWKAKKCPMGFAYDTRCFDSTVTENDIRVEESIYQCCDLAPEARQAIRSLTERLYIGGPLTNSKGQNCGYRRCRASGVLTTSCGNTLTCYLKAAAACRAAKLQDCTMLVCGDDLVVICESAGTQEDEASLRAFTEAMTRYSAPPGDPPKPEYDLELITSCSSNVSVAHDASGKRVYYLTRDPTTPLARAAWETARHTPVNSWLGNIIMYAPTPWARMILMTHFFSILLAQEQLEKTLDCQIYGACYSIEPLDLPQIIQRLHGLSAFSLHSYSPGEVNRVVSCLRKLGVPPLRVWRHRARSVRARLLSQGGRAATCGKYLFNWAVRTKLKLTPIPAASQLDLSSWFVAGYSGGDIYHSLSRARPRWFMWCLLLLSVGVGIYLLPNR

SEQ ID NO: 465 - protein, 591 aa, Artificial Sequence
  Synthetic peptide
SMSYTWTGALITPCAAEETKLPINALSNSLLRHHNLVYATTSRSASLRQKKVTFDRLQVLDDHYRDVLKEMKAKASTVKAKLLSVEEACKLTPPHSARSKFGYGAKDVRNLSSKAVNHIRSVWKDLLEDTETPIDTTIMAKNEVFCVQPEKGGRKPARLIVFPDLGVRVCEKMALYDVVSTLPQAVMGSSYGFQYSPGQRVEFLVNAWKAKKCPMGFAYDTRCFDSTVTENDIRVEESIYQCCDLAPEARQAIRSLTERLYIGGPLTNSKGQNCGYRRCRASGVLTTSCGNTLTCYLKAAAACRAAKLQDCTMLVCGDDLVVICESAGTQEDEASLRAFTEAMTRYSAPPGDPPKPEYDLELITSCSSNVSVAHDASGKRVYYLTRDPTTPLARAAWETARHTPVNSWLGNIIMYAPTPWARMILMTHFFSILLAQEQLEKTLDCQIYGACYSIEPLDLPQIIQRLHGLSAFSLHSYSPGEVNRVISCLRKLGVPPLRVWRHRARSVRARLLSQGGRAATCGKYLFNWAVRTKLKLTPIPAASQLDLSSWFVAGYSGGDIYHSLSRARPRWFMWCLLLLSVGVGIYLLPNR

SEQ ID NO: 466 - protein, 591 aa, Artificial Sequence
  Synthetic peptide
SMSYTWTGALITPCAAEETKLPINALSNSLLRHHNLVYATTSRSASLRQKKVTFDRLQVLDDHYRDVLKEMKAKASTVKAKLLSVEEACKLTPPHSARSKFGYGAKDVRNLSSKAVNHIRSVWKDLLEDTETPIDTTIMAKNEVFCVQPEKGGRKPARLIVFPDLGVRVCEKMALYDVVSTLPQAVMGSSYGFQYSPGQRVEFLVNAWKAKKCPMGFAYDTRCFDSTVTENDIRVEESIYQCCDLAPEARQAIRSLTERLYIGGPLTNSKGQNCGYRRCRASGVLTTSCGNTLTCYLKAAAACRAAKLQDCTMLVCGDDLVVICESAGTQEDEASLRAFTEAMTRYSAPPGDPPKPEYDLELITSCSSNVSVAHDASGKRVYYLTRDPTTPLARAAWETARHTPVNSWLGNIIMYAPTPWARMILMTHFFSILLAQEQLEKTLDCQIYGACYSIEPLDLPQIIQRLHGLSAFSLHSYSPGEVNRVTSCLRKLGVPPLRVWRHRARSVRARLLSQGGRAATCGKYLFNWAVRTKLKLTPIPAASQLDLSSWFVAGYSGGDIYHSLSRARPRWFMWCLLLLSVGVGIYLLPNR

SEQ ID NO: 467 - protein, 591 aa, Artificial Sequence
  Synthetic peptide
SMSYTWTGALITPCAAEETKLPINALSNSLLRHHNLVYATTSRSASLRQKKVTFDRLQVLDDHYRDVLKEMKAKASTVKAKLLSVEEACKLTPPHSARSKFGYGAKDVRNLSSKAVNHIRSVWKDLLEDTETPIDTTIMAKNEVFCVQPEKGGRKPARLIVFPDLGVRVCEKMALYDVVSTLPQAVMGSSYGFQYSPGQRVEFLVNAWKAKKCPMGFAYDTRCFDSTVTENDIRVEESIYQCCDLAPEARQAIRSLTERLYIGGPLTNSKGQNCGYRRCRASGVLTTSCGNTLTCYLKAAAACRAAKLQDCTMLVCGDDLVVICESAGTQEDEASLRAFTEAMTRYSAPPGDPPKPEYDLELITSCSSNVSVAHDASGKRVYYLTRDPTTPLARAAWETARHTPVNSWLGNIIMYAPTPWARMILMTHFFSILLAQEQLEKTLDCQIYGACYSIEPLDLPQIIQRLHGLSAFSLHSYSPGEVNRVSSCLRKLGVPPLRVWRHRARSVRARLLSQGGRAATCGKYLFNWAVRTKLKLTPIPAASQLDLSSWFVAGYSGGDIYHSLSRARPRWFMWCLLLLSVGVGIYLLPNR

SEQ ID NO: 468 - protein, 591 aa, Artificial Sequence
  Synthetic peptide
SMSYTWTGALITPCAAEETKLPINALSNSLLRHHNLVYATTSRSASLRQKKVTFDRLQVLDDHYRDVLKEMKAKASTVKAKLLSVEEACKLTPPHSARSKFGYGAKDVRNLSSKAVNHIRSVWKDLLEDTETPIDTTIMAKNEVFCVQPEKGGRKPARLIVFPDLGVRVCEKMALYDVVSTLPQAVMGSSYGFQYSPGQRVEFLVNAWKAKKCPMGFAYDTRCFDSTVTENDIRVEESIYQCCDLAPEARQAIRSLTERLYIGGPLTNSKGQNCGYRRCRASGVLTTSCGNTLTCYLKAAAACRAAKLQDCTMLVCGDDLVVICESAGTQEDEASLRAFTEAMTRYSAPPGDPPKPEYDLELITSCSSNVSVAHDASGKRVYYLTRDPTTPLARAAWETARHTPVNSWLGNIIMYAPTPWARMILMTHFFSILLAQEQLEKTLDCQIYGACYSIEPLDLPQIIQRLHGLSAFSLHSYSPGEVNRVASCLRKLGIPPLRVWRHRARSVRARLLSQGGRAATCGKYLFNWAVRTKLKLTPIPAASQLDLSSWFVAGYSGGDIYHSLSRARPRWFMWCLLLLSVGVGIYLLPNR

SEQ ID NO: 469 - protein, 591 aa, Artificial Sequence
  Synthetic peptide
SMSYTWTGALITPCAAEETKLPINALSNSLLRHHNLVYATTSRSASLRQKKVTFDRLQVLDDHYRDVLKEMKAKASTVKAKLLSVEEACKLTPPHSARSKFGYGAKDVRNLSSKAVNHIRSVWKDLLEDTETPIDTTIMAKNEVFCVQPEKGGRKPARLIVFPDLGVRVCEKMALYDVVSTLPQAVMGSSYGFQYSPGQRVEFLVNAWKAKKCPMGFAYDTRCFDSTVTENDIRVEESIYQCCDLAPEARQAIRSLTERLYIGGPLTNSKGQNCGYRRCRASGVLTTSCGNTLTCYLKAAAACRAAKLQDCTMLVCGDDLVVICESAGTQEDEASLRAFTEAMTRYSAPPGDPPKPEYDLELITSCSSNVSVAHDASGKRVYYLTRDPTTPLARAAWETARHTPVNSWLGNIIMYAPTPWARMILMTHFFSILLAQEQLEKTLDCQIYGACYSIEPLDLPQIIQRLHGLSAFSLHSYSPGEVNRVVSCLRKLGIPPLRVWRHRARSVRARLLSQGGRAATCGKYLFNWAVRTKLKLTPIPAASQLDLSSWFVAGYSGGDIYHSLSRARPRWFMWCLLLLSVGVGIYLLPNR

SEQ ID NO: 470 - protein, 591 aa, Artificial Sequence
  Synthetic peptide
SMSYTWTGALITPCAAEETKLPINALSNSLLRHHNLVYATTSRSASLRQKKVTFDRLQVLDDHYRDVLKEMKAKASTVKAKLLSVEEACKLTPPHSARSKFGYGAKDVRNLSSKAVNHIRSVWKDLLEDTETPIDTTIMAKNEVFCVQPEKGGRKPARLIVFPDLGVRVCEKMALYDVVSTLPQAVMGSSYGFQYSPGQRVEFLVNAWKAKKCPMGFAYDTRCFDSTVTENDIRVEESIYQCCDLAPEARQAIRSLTERLYIGGPLTNSKGQNCGYRRCRASGVLTTSCGNTLTCYLKAAAACRAAKLQDCTMLVCGDDLVVICESAGTQEDEASLRAFTEAMTRYSAPPGDPPKPEYDLELITSCSSNVSVAHDASGKRVYYLTRDPTTPLARAAWETARHTPVNSWLGNIIMYAPTPWARMILMTHFFSILLAQEQLEKTLDCQIYGACYSIEPLDLPQIIQRLHGLSAFSLHSYSPGEVNRVISCLRKLGIPPLRVWRHRARSVRARLLSQGGRAATCGKYLFNWAVRTKLKLTPIPAASQLDLSSWFVAGYSGGDIYHSLSRARPRWFMWCLLLLSVGVGIYLLPNR

SEQ ID NO: 471 - protein, 591 aa, Artificial Sequence
  Synthetic peptide
SMSYTWTGALITPCAAEETKLPINALSNSLLRHHNLVYATTSRSASLRQKKVTFDRLQVLDDHYRDVLKEMKAKASTVKAKLLSVEEACKLTPPHSARSKFGYGAKDVRNLSSKAVNHIRSVWKDLLEDTETPIDTTIMAKNEVFCVQPEKGGRKPARLIVFPDLGVRVCEKMALYDVVSTLPQAVMGSSYGFQYSPGQRVEFLVNAWKAKKCPMGFAYDTRCFDSTVTENDIRVEESIYQCCDLAPEARQAIRSLTERLYIGGPLTNSKGQNCGYRRCRASGVLTTSCGNTLTCYLKAAAACRAAKLQDCTMLVCGDDLVVICESAGTQEDEASLRAFTEAMTRYSAPPGDPPKPEYDLELITSCSSNVSVAHDASGKRVYYLTRDPTTPLARAAWETARHTPVNSWLGNIIMYAPTPWARMILMTHFFSILLAQEQLEKTLDCQIYGACYSIEPLDLPQIIQRLHGLSAFSLHSYSPGEVNRVTSCLRKLGIPPLRVWRHRARSVRARLLSQGGRAATCGKYLFNWAVRTKLKLTPIPAASQLDLSSWFVAGYSGGDIYHSLSRARPRWFMWCLLLLSVGVGIYLLPNR

SEQ ID NO: 472 - protein, 591 aa, Artificial Sequence
  Synthetic peptide
SMSYTWTGALITPCAAEETKLPINALSNSLLRHHNLVYATTSRSASLRQKKVTFDRLQVLDDHYRDVLKEMKAKASTVKAKLLSVEEACKLTPPHSARSKFGYGAKDVRNLSSKAVNHIRSVWKDLLEDTETPIDTTIMAKNEVFCVQPEKGGRKPARLIVFPDLGVRVCEKMALYDVVSTLPQAVMGSSYGFQYSPGQRVEFLVNAWKAKKCPMGFAYDTRCFDSTVTENDIRVEESIYQCCDLAPEARQAIRSLTERLYIGGPLTNSKGQNCGYRRCRASGVLTTSCGNTLTCYLKAAAACRAAKLQDCTMLVCGDDLVVICESAGTQEDEASLRAFTEAMTRYSAPPGDPPKPEYDLELITSCSSNVSVAHDASGKRVYYLTRDPTTPLARAAWETARHTPVNSWLGNIIMYAPTPWARMILMTHFFSILLAQEQLEKTLDCQIYGACYSIEPLDLPQIIQRLHGLSAFSLHSYSPGEVNRVSSCLRKLGIPPLRVWRHRARSVRARLLSQGGRAATCGKYLFNWAVRTKLKLTPIPAASQLDLSSWFVAGYSGGDIYHSLSRARPRWFMWCLLLLSVGVGIYLLPNR

SEQ ID NO: 473 - protein, 591 aa, Artificial Sequence
  Synthetic peptide
SMSYTWTGALITPCAAEETKLPINALSNSLLRHHNLVYATTSRSASLRQKKVTFDRLQVLDDHYRDVLKEMKAKASTVKAKLLSVEEACKLTPPHSARSKFGYGAKDVRNLSSKAVNHIRSVWKDLLEDTETPIDTTIMAKNEVFCVQPEKGGRKPARLIVFPDLGVRVCEKMALYDVVSTLPQAVMGSSYGFQYSPGQRVEFLVNAWKAKKCPMGFAYDTRCFDSTVTENDIRVEESIYQCCDLAPEARQAIRSLTERLYIGGPLTNSKGQNCGYRRCRASGVLTTSCGNTLTCYLKAAAACRAAKLQDCTMLVCGDDLVVICESAGTQEDEASLRAFTEAMTRYSAPPGDPPKPEYDLELITSCSSNVSVAHDASGKRVYYLTRDPTTPLARAAWETARHTPVNSWLGNIIMYAPTPWARAILMTHFFSILLAQEQLEKTLDCQIYGACYSIEPLDLPQIIQRLHGLSAFSLHSYSPGEVNRVASCLRKLGVPPLRVWRHRARSVRARLLSQGGRAATCGKYLFNWAVRTKLKLTPIPAASQLDLSSWFVAGYSGGDIYHSLSRARPRWFMWCLLLLSVGVGIYLLPNR

SEQ ID NO: 474 - protein, 591 aa, Artificial Sequence
  Synthetic peptid
SMSYTWTGALITPCAAEETKLPINALSNSLLRHHNLVYATTSRSASLRQKKVTFDRLQVLDDHYRDVLKEMKAKASTVKAKLLSVEEACKLTPPHSARSKFGYGAKDVRNLSSKAVNHIRSVWKDLLEDTETPIDTTIMAKNEVFCVQPEKGGRKPARLIVFPDLGVRVCEKMALYDVVSTLPQAVMGSSYGFQYSPGQRVEFLVNAWKAKKCPMGFAYDTRCFDSTVTENDIRVEESIYQCCDLAPEARQAIRSLTERLYIGGPLTNSKGQNCGYRRCRASGVLTTSCGNTLTCYLKAAAACRAAKLQDCTMLVCGDDLVVICESAGTQEDEASLRAFTEAMTRYSAPPGDPPKPEYDLELITSCSSNVSVAHDASGKRVYYLTRDPTTPLARAAWETARHTPVNSWLGNIIMYAPTPWARAILMTHFFSILLAQEQLEKTLDCQIYGACYSIEPLDLPQIIQRLHGLSAFSLHSYSPGEVNRVVSCLRKLGVPPLRVWRHRARSVRARLLSQGGRAATCGKYLFNWAVRTKLKLTPIPAASQLDLSSWFVAGYSGGDIYHSLSRARPRWFMWCLLLLSVGVGIYLLPNR

SEQ ID NO: 475 - protein, 591 aa, Artificial Sequence
  Synthetic peptide
SMSYTWTGALITPCAAEETKLPINALSNSLLRHHNLVYATTSRSASLRQKKVTFDRLQVLDDHYRDVLKEMKAKASTVKAKLLSVEEACKLTPPHSARSKFGYGAKDVRNLSSKAVNHIRSVWKDLLEDTETPIDTTIMAKNEVFCVQPEKGGRKPARLIVFPDLGVRVCEKMALYDVVSTLPQAVMGSSYGFQYSPGQRVEFLVNAWKAKKCPMGFAYDTRCFDSTVTENDIRVEESIYQCCDLAPEARQAIRSLTERLYIGGPLTNSKGQNCGYRRCRASGVLTTSCGNTLTCYLKAAAACRAAKLQDCTMLVCGDDLVVICESAGTQEDEASLRAFTEAMTRYSAPPGDPPKPEYDLELITSCSSNVSVAHDASGKRVYYLTRDPTTPLARAAWETARHTPVNSWLGNIIMYAPTPWARAILMTHFFSILLAQEQLEKTLDCQIYGACYSIEPLDLPQIIQRLHGLSAFSLHSYSPGEVNRVISCLRKLGVPPLRVWRHRARSVRARLLSQGGRAATCGKYLFNWAVRTKLKLTPIPAASQLDLSSWFVAGYSGGDIYHSLSRARPRWFMWCLLLLSVGVGIYLLPNR

SEQ ID NO: 476 - protein, 591 aa, Artificial Sequence
  Synthetic peptide
SMSYTWTGALITPCAAEETKLPINALSNSLLRHHNLVYATTSRSASLRQKKVTFDRLQVLDDHYRDVLKEMKAKASTVKAKLLSVEEACKLTPPHSARSKFGYGAKDVRNLSSKAVNHIRSVWKDLLEDTETPIDTTIMAKNEVFCVQPEKGGRKPARLIVFPDLGVRVCEKMALYDVVSTLPQAVMGSSYGFQYSPGQRVEFLVNAWKAKKCPMGFAYDTRCFDSTVTENDIRVEESIYQCCDLAPEARQAIRSLTERLYIGGPLTNSKGQNCGYRRCRASGVLTTSCGNTLTCYLKAAAACRAAKLQDCTMLVCGDDLVVICESAGTQEDEASLRAFTEAMTRYSAPPGDPPKPEYDLELITSCSSNVSVAHDASGKRVYYLTRDPTTPLARAAWETARHTPVNSWLGNIIMYAPTPWARAILMTHFFSILLAQEQLEKTLDCQIYGACYSIEPLDLPQIIQRLHGLSAFSLHSYSPGEVNRVTSCLRKLGVPPLRVWRHRARSVRARLLSQGGRAATCGKYLFNWAVRTKLKLTPIPAASQLDLSSWFVAGYSGGDIYHSLSRARPRWFMWCLLLLSVGVGIYLLPNR

SEQ ID NO: 477 - protein, 591 aa, Artificial Sequence
  Synthetic peptide
SMSYTWTGALITPCAAEETKLPINALSNSLLRHHNLVYATTSRSASLRQKKVTFDRLQVLDDHYRDVLKEMKAKASTVKAKLLSVEEACKLTPPHSARSKFGYGAKDVRNLSSKAVNHIRSVWKDLLEDTETPIDTTIMAKNEVFCVQPEKGGRKPARLIVFPDLGVRVCEKMALYDVVSTLPQAVMGSSYGFQYSPGQRVEFLVNAWKAKKCPMGFAYDTRCFDSTVTENDIRVEESIYQCCDLAPEARQAIRSLTERLYIGGPLTNSKGQNCGYRRCRASGVLTTSCGNTLTCYLKAAAACRAAKLQDCTMLVCGDDLVVICESAGTQEDEASLRAFTEAMTRYSAPPGDPPKPEYDLELITSCSSNVSVAHDASGKRVYYLTRDPTTPLARAAWETARHTPVNSWLGNIIMYAPTPWARAILMTHFFSILLAQEQLEKTLDCQIYGACYSIEPLDLPQIIQRLHGLSAFSLHSYSPGEVNRVSSCLRKLGVPPLRVWRHRARSVRARLLSQGGRAATCGKYLFNWAVRTKLKLTPIPAASQLDLSSWFVAGYSGGDIYHSLSRARPRWFMWCLLLLSVGVGIYLLPNR

SEQ ID NO: 478 - protein, 591 aa, Artificial Sequence
  Synthetic peptide
SMSYTWTGALITPCAAEETKLPINALSNSLLRHHNLVYATTSRSASLRQKKVTFDRLQVLDDHYRDVLKEMKAKASTVKAKLLSVEEACKLTPPHSARSKFGYGAKDVRNLSSKAVNHIRSVWKDLLEDTETPIDTTIMAKNEVFCVQPEKGGRKPARLIVFPDLGVRVCEKMALYDVVSTLPQAVMGSSYGFQYSPGQRVEFLVNAWKAKKCPMGFAYDTRCFDSTVTENDIRVEESIYQCCDLAPEARQAIRSLTERLYIGGPLTNSKGQNCGYRRCRASGVLTTSCGNTLTCYLKAAAACRAAKLQDCTMLVCGDDLVVICESAGTQEDEASLRAFTEAMTRYSAPPGDPPKPEYDLELITSCSSNVSVAHDASGKRVYYLTRDPTTPLARAAWETARHTPVNSWLGNIIMYAPTPWARAILMTHFFSILLAQEQLEKTLDCQIYGACYSIEPLDLPQIIQRLHGLSAFSLHSYSPGEVNRVASCLRKLGIPPLRVWRHRARSVRARLLSQGGRAATCGKYLFNWAVRTKLKLTPIPAASQLDLSSWFVAGYSGGDIYHSLSRARPRWFMWCLLLLSVGVGIYLLPNR

SEQ ID NO: 479 - protein, 591 aa, Artificial Sequence
  Synthetic peptide
SMSYTWTGALITPCAAEETKLPINALSNSLLRHHNLVYATTSRSASLRQKKVTFDRLQVLDDHYRDVLKEMKAKASTVKAKLLSVEEACKLTPPHSARSKFGYGAKDVRNLSSKAVNHIRSVWKDLLEDTETPIDTTIMAKNEVFCVQPEKGGRKPARLIVFPDLGVRVCEKMALYDVVSTLPQAVMGSSYGFQYSPGQRVEFLVNAWKAKKCPMGFAYDTRCFDSTVTENDIRVEESIYQCCDLAPEARQAIRSLTERLYIGGPLTNSKGQNCGYRRCRASGVLTTSCGNTLTCYLKAAAACRAAKLQDCTMLVCGDDLVVICESAGTQEDEASLRAFTEAMTRYSAPPGDPPKPEYDLELITSCSSNVSVAHDASGKRVYYLTRDPTTPLARAAWETARHTPVNSWLGNIIMYAPTPWARAILMTHFFSILLAQEQLEKTLDCQIYGACYSIEPLDLPQIIQRLHGLSAFSLHSYSPGEVNRVVSCLRKLGIPPLRVWRHRARSVRARLLSQGGRAATCGKYLFNWAVRTKLKLTPIPAASQLDLSSWFVAGYSGGDIYHSLSRARPRWFMWCLLLLSVGVGIYLLPNR

SEQ ID NO: 480 - protein, 591 aa, Artificial Sequence
  Synthetic peptide
SMSYTWTGALITPCAAEETKLPINALSNSLLRHHNLVYATTSRSASLRQKKVTFDRLQVLDDHYRDVLKEMKAKASTVKAKLLSVEEACKLTPPHSARSKFGYGAKDVRNLSSKAVNHIRSVWKDLLEDTETPIDTTIMAKNEVFCVQPEKGGRKPARLIVFPDLGVRVCEKMALYDVVSTLPQAVMGSSYGFQYSPGQRVEFLVNAWKAKKCPMGFAYDTRCFDSTVTENDIRVEESIYQCCDLAPEARQAIRSLTERLYIGGPLTNSKGQNCGYRRCRASGVLTTSCGNTLTCYLKAAAACRAAKLQDCTMLVCGDDLVVICESAGTQEDEASLRAFTEAMTRYSAPPGDPPKPEYDLELITSCSSNVSVAHDASGKRVYYLTRDPTTPLARAAWETARHTPVNSWLGNIIMYAPTPWARAILMTHFFSILLAQEQLEKTLDCQIYGACYSIEPLDLPQIIQRLHGLSAFSLHSYSPGEVNRVISCLRKLGIPPLRVWRHRARSVRARLLSQGGRAATCGKYLFNWAVRTKLKLTPIPAASQLDLSSWFVAGYSGGDIYHSLSRARPRWFMWCLLLLSVGVGIYLLPNR

SEQ ID NO: 481 - protein, 591 aa, Artificial Sequence
  Synthetic peptide
SMSYTWTGALITPCAAEETKLPINALSNSLLRHHNLVYATTSRSASLRQKKVTFDRLQVLDDHYRDVLKEMKAKASTVKAKLLSVEEACKLTPPHSARSKFGYGAKDVRNLSSKAVNHIRSVWKDLLEDTETPIDTTIMAKNEVFCVQPEKGGRKPARLIVFPDLGVRVCEKMALYDVVSTLPQAVMGSSYGFQYSPGQRVEFLVNAWKAKKCPMGFAYDTRCFDSTVTENDIRVEESIYQCCDLAPEARQAIRSLTERLYIGGPLTNSKGQNCGYRRCRASGVLTTSCGNTLTCYLKAAAACRAAKLQDCTMLVCGDDLVVICESAGTQEDEASLRAFTEAMTRYSAPPGDPPKPEYDLELITSCSSNVSVAHDASGKRVYYLTRDPTTPLARAAWETARHTPVNSWLGNIIMYAPTPWARAILMTHFFSILLAQEQLEKTLDCQIYGACYSIEPLDLPQIIQRLHGLSAFSLHSYSPGEVNRVTSCLRKLGIPPLRVWRHRARSVRARLLSQGGRAATCGKYLFNWAVRTKLKLTPIPAASQLDLSSWFVAGYSGGDIYHSLSRARPRWFMWCLLLLSVGVGIYLLPNR

SEQ ID NO: 482 - protein, 591 aa, Artificial Sequence
  Synthetic peptide
SMSYTWTGALITPCAAEETKLPINALSNSLLRHHNLVYATTSRSASLRQKKVTFDRLQVLDDHYRDVLKEMKAKASTVKAKLLSVEEACKLTPPHSARSKFGYGAKDVRNLSSKAVNHIRSVWKDLLEDTETPIDTTIMAKNEVFCVQPEKGGRKPARLIVFPDLGVRVCEKMALYDVVSTLPQAVMGSSYGFQYSPGQRVEFLVNAWKAKKCPMGFAYDTRCFDSTVTENDIRVEESIYQCCDLAPEARQAIRSLTERLYIGGPLTNSKGQNCGYRRCRASGVLTTSCGNTLTCYLKAAAACRAAKLQDCTMLVCGDDLVVICESAGTQEDEASLRAFTEAMTRYSAPPGDPPKPEYDLELITSCSSNVSVAHDASGKRVYYLTRDPTTPLARAAWETARHTPVNSWLGNIIMYAPTPWARAILMTHFFSILLAQEQLEKTLDCQIYGACYSIEPLDLPQIIQRLHGLSAFSLHSYSPGEVNRVSSCLRKLGIPPLRVWRHRARSVRARLLSQGGRAATCGKYLFNWAVRTKLKLTPIPAASQLDLSSWFVAGYSGGDIYHSLSRARPRWFMWCLLLLSVGVGIYLLPNR

SEQ ID NO: 483 - protein, 591 aa, Artificial Sequence
  Synthetic peptide
SMSYTWTGALITPCAAEETKLPINALSNSLLRHHNLVYATTSRSASLRQKKVTFDRLQVLDDHYRDVLKEMKAKASTVKAKLLSVEEACKLTPPHSARSKFGYGAKDVRNLSSKAVNHIRSVWKDLLEDTETPIDTTIMAKNEVFCVQPEKGGRKPARLIVFPDLGVRVCEKMALYDVVSTLPQAVMGSSYGFQYSPGQRVEFLVNAWKAKKCPMGFAYDTRCFDSTVTENDIRVEESIYQCCDLAPEARQAIRSLTERLYIGGPLTNSKGQNCGYRRCRASGVLTTSCGNTLTCYLKAAAACRAAKLQDCTMLVCGDDLVVICESAGTQEDEASLRAFTEAMTRYSAPPGDPPKPEYDLELITSCSSNVSVAHDASGKRVYYLTRDPTTPLARAAWETARHTPVNSWLGNIIMYAPTPWARMILMTHFFSILLAQEQLEKTLDCQIYGACYSIEPLDLPQIIQRLHGLSAFSLHSYSPGEDNRVASCLRKLGVPPLRVWRHRARSVRARLLSQGGRAATCGKYLFNWAVRTKLKLTPIPAASQLDLSSWFVAGYSGGDIYHSLSRARPRWFMWCLLLLSVGVGIYLLPNR

SEQ ID NO: 484 - protein, 591 aa, Artificial Sequence
  Synthetic peptide
SMSYTWTGALITPCAAEETKLPINALSNSLLRHHNLVYATTSRSASLRQKKVTFDRLQVLDDHYRDVLKEMKAKASTVKAKLLSVEEACKLTPPHSARSKFGYGAKDVRNLSSKAVNHIRSVWKDLLEDTETPIDTTIMAKNEVFCVQPEKGGRKPARLIVFPDLGVRVCEKMALYDVVSTLPQAVMGSSYGFQYSPGQRVEFLVNAWKAKKCPMGFAYDTRCFDSTVTENDIRVEESIYQCCDLAPEARQAIRSLTERLYIGGPLTNSKGQNCGYRRCRASGVLTTSCGNTLTCYLKAAAACRAAKLQDCTMLVCGDDLVVICESAGTQEDEASLRAFTEAMTRYSAPPGDPPKPEYDLELITSCSSNVSVAHDASGKRVYYLTRDPTTPLARAAWETARHTPVNSWLGNIIMYAPTPWARMILMTHFFSILLAQEQLEKTLDCQIYGACYSIEPLDLPQIIQRLHGLSAFSLHSYSPGEDNRVVSCLRKLGVPPLRVWRHRARSVRARLLSQGGRAATCGKYLFNWAVRTKLKLTPIPAASQLDLSSWFVAGYSGGDIYHSLSRARPRWFMWCLLLLSVGVGIYLLPNR

SEQ ID NO: 485 - protein, 591 aa, Artificial Sequence
  Synthetic peptid
SMSYTWTGALITPCAAEETKLPINALSNSLLRHHNLVYATTSRSASLRQKKVTFDRLQVLDDHYRDVLKEMKAKASTVKAKLLSVEEACKLTPPHSARSKFGYGAKDVRNLSSKAVNHIRSVWKDLLEDTETPIDTTIMAKNEVFCVQPEKGGRKPARLIVFPDLGVRVCEKMALYDVVSTLPQAVMGSSYGFQYSPGQRVEFLVNAWKAKKCPMGFAYDTRCFDSTVTENDIRVEESIYQCCDLAPEARQAIRSLTERLYIGGPLTNSKGQNCGYRRCRASGVLTTSCGNTLTCYLKAAAACRAAKLQDCTMLVCGDDLVVICESAGTQEDEASLRAFTEAMTRYSAPPGDPPKPEYDLELITSCSSNVSVAHDASGKRVYYLTRDPTTPLARAAWETARHTPVNSWLGNIIMYAPTPWARMILMTHFFSILLAQEQLEKTLDCQIYGACYSIEPLDLPQIIQRLHGLSAFSLHSYSPGEDNRVISCLRKLGVPPLRVWRHRARSVRARLLSQGGRAATCGKYLFNWAVRTKLKLTPIPAASQLDLSSWFVAGYSGGDIYHSLSRARPRWFMWCLLLLSVGVGIYLLPNR

SEQ ID NO: 486 - protein, 591 aa, Artificial Sequence
  Synthetic peptide
SMSYTWTGALITPCAAEETKLPINALSNSLLRHHNLVYATTSRSASLRQKKVTFDRLQVLDDHYRDVLKEMKAKASTVKAKLLSVEEACKLTPPHSARSKFGYGAKDVRNLSSKAVNHIRSVWKDLLEDTETPIDTTIMAKNEVFCVQPEKGGRKPARLIVFPDLGVRVCEKMALYDVVSTLPQAVMGSSYGFQYSPGQRVEFLVNAWKAKKCPMGFAYDTRCFDSTVTENDIRVEESIYQCCDLAPEARQAIRSLTERLYIGGPLTNSKGQNCGYRRCRASGVLTTSCGNTLTCYLKAAAACRAAKLQDCTMLVCGDDLVVICESAGTQEDEASLRAFTEAMTRYSAPPGDPPKPEYDLELITSCSSNVSVAHDASGKRVYYLTRDPTTPLARAAWETARHTPVNSWLGNIIMYAPTPWARMILMTHFFSILLAQEQLEKTLDCQIYGACYSIEPLDLPQIIQRLHGLSAFSLHSYSPGEDNRVTSCLRKLGVPPLRVWRHRARSVRARLLSQGGRAATCGKYLFNWAVRTKLKLTPIPAASQLDLSSWFVAGYSGGDIYHSLSRARPRWFMWCLLLLSVGVGIYLLPNR

SEQ ID NO: 487 - protein, 591 aa, Artificial Sequence
  Synthetic peptide
SMSYTWTGALITPCAAEETKLPINALSNSLLRHHNLVYATTSRSASLRQKKVTFDRLQVLDDHYRDVLKEMKAKASTVKAKLLSVEEACKLTPPHSARSKFGYGAKDVRNLSSKAVNHIRSVWKDLLEDTETPIDTTIMAKNEVFCVQPEKGGRKPARLIVFPDLGVRVCEKMALYDVVSTLPQAVMGSSYGFQYSPGQRVEFLVNAWKAKKCPMGFAYDTRCFDSTVTENDIRVEESIYQCCDLAPEARQAIRSLTERLYIGGPLTNSKGQNCGYRRCRASGVLTTSCGNTLTCYLKAAAACRAAKLQDCTMLVCGDDLVVICESAGTQEDEASLRAFTEAMTRYSAPPGDPPKPEYDLELITSCSSNVSVAHDASGKRVYYLTRDPTTPLARAAWETARHTPVNSWLGNIIMYAPTPWARMILMTHFFSILLAQEQLEKTLDCQIYGACYSIEPLDLPQIIQRLHGLSAFSLHSYSPGEDNRVSSCLRKLGVPPLRVWRHRARSVRARLLSQGGRAATCGKYLFNWAVRTKLKLTPIPAASQLDLSSWFVAGYSGGDIYHSLSRARPRWFMWCLLLLSVGVGIYLLPNR

SEQ ID NO: 488 - protein, 591 aa, Artificial Sequence
  Synthetic peptide
SMSYTWTGALITPCAAEETKLPINALSNSLLRHHNLVYATTSRSASLRQKKVTFDRLQVLDDHYRDVLKEMKAKASTVKAKLLSVEEACKLTPPHSARSKFGYGAKDVRNLSSKAVNHIRSVWKDLLEDTETPIDTTIMAKNEVFCVQPEKGGRKPARLIVFPDLGVRVCEKMALYDVVSTLPQAVMGSSYGFQYSPGQRVEFLVNAWKAKKCPMGFAYDTRCFDSTVTENDIRVEESIYQCCDLAPEARQAIRSLTERLYIGGPLTNSKGQNCGYRRCRASGVLTTSCGNTLTCYLKAAAACRAAKLQDCTMLVCGDDLVVICESAGTQEDEASLRAFTEAMTRYSAPPGDPPKPEYDLELITSCSSNVSVAHDASGKRVYYLTRDPTTPLARAAWETARHTPVNSWLGNIIMYAPTPWARMILMTHFFSILLAQEQLEKTLDCQIYGACYSIEPLDLPQIIQRLHGLSAFSLHSYSPGEDNRVASCLRKLGIPPLRVWRHRARSVRARLLSQGGRAATCGKYLFNWAVRTKLKLTPIPAASQLDLSSWFVAGYSGGDIYHSLSRARPRWFMWCLLLLSVGVGIYLLPNR

SEQ ID NO: 489 - protein, 591 aa, Artificial Sequence
  Synthetic peptide
SMSYTWTGALITPCAAEETKLPINALSNSLLRHHNLVYATTSRSASLRQKKVTFDRLQVLDDHYRDVLKEMKAKASTVKAKLLSVEEACKLTPPHSARSKFGYGAKDVRNLSSKAVNHIRSVWKDLLEDTETPIDTTIMAKNEVFCVQPEKGGRKPARLIVFPDLGVRVCEKMALYDVVSTLPQAVMGSSYGFQYSPGQRVEFLVNAWKAKKCPMGFAYDTRCFDSTVTENDIRVEESIYQCCDLAPEARQAIRSLTERLYIGGPLTNSKGQNCGYRRCRASGVLTTSCGNTLTCYLKAAAACRAAKLQDCTMLVCGDDLVVICESAGTQEDEASLRAFTEAMTRYSAPPGDPPKPEYDLELITSCSSNVSVAHDASGKRVYYLTRDPTTPLARAAWETARHTPVNSWLGNIIMYAPTPWARMILMTHFFSILLAQEQLEKTLDCQIYGACYSIEPLDLPQIIQRLHGLSAFSLHSYSPGEDNRVVSCLRKLGIPPLRVWRHRARSVRARLLSQGGRAATCGKYLFNWAVRTKLKLTPIPAASQLDLSSWFVAGYSGGDIYHSLSRARPRWFMWCLLLLSVGVGIYLLPNR

SEQ ID NO: 490 - protein, 591 aa, Artificial Sequence
  Synthetic peptide
SMSYTWTGALITPCAAEETKLPINALSNSLLRHHNLVYATTSRSASLRQKKVTFDRLQVLDDHYRDVLKEMKAKASTVKAKLLSVEEACKLTPPHSARSKFGYGAKDVRNLSSKAVNHIRSVWKDLLEDTETPIDTTIMAKNEVFCVQPEKGGRKPARLIVFPDLGVRVCEKMALYDVVSTLPQAVMGSSYGFQYSPGQRVEFLVNAWKAKKCPMGFAYDTRCFDSTVTENDIRVEESIYQCCDLAPEARQAIRSLTERLYIGGPLTNSKGQNCGYRRCRASGVLTTSCGNTLTCYLKAAAACRAAKLQDCTMLVCGDDLVVICESAGTQEDEASLRAFTEAMTRYSAPPGDPPKPEYDLELITSCSSNVSVAHDASGKRVYYLTRDPTTPLARAAWETARHTPVNSWLGNIIMYAPTPWARMILMTHFFSILLAQEQLEKTLDCQIYGACYSIEPLDLPQIIQRLHGLSAFSLHSYSPGEDNRVISCLRKLGIPPLRVWRHRARSVRARLLSQGGRAATCGKYLFNWAVRTKLKLTPIPAASQLDLSSWFVAGYSGGDIYHSLSRARPRWFMWCLLLLSVGVGIYLLPNR

SEQ ID NO: 491 - protein, 591 aa, Artificial Sequence
  Synthetic peptide
SMSYTWTGALITPCAAEETKLPINALSNSLLRHHNLVYATTSRSASLRQKKVTFDRLQVLDDHYRDVLKEMKAKASTVKAKLLSVEEACKLTPPHSARSKFGYGAKDVRNLSSKAVNHIRSVWKDLLEDTETPIDTTIMAKNEVFCVQPEKGGRKPARLIVFPDLGVRVCEKMALYDVVSTLPQAVMGSSYGFQYSPGQRVEFLVNAWKAKKCPMGFAYDTRCFDSTVTENDIRVEESIYQCCDLAPEARQAIRSLTERLYIGGPLTNSKGQNCGYRRCRASGVLTTSCGNTLTCYLKAAAACRAAKLQDCTMLVCGDDLVVICESAGTQEDEASLRAFTEAMTRYSAPPGDPPKPEYDLELITSCSSNVSVAHDASGKRVYYLTRDPTTPLARAAWETARHTPVNSWLGNIIMYAPTPWARMILMTHFFSILLAQEQLEKTLDCQIYGACYSIEPLDLPQIIQRLHGLSAFSLHSYSPGEDNRVTSCLRKLGIPPLRVWRHRARSVRARLLSQGGRAATCGKYLFNWAVRTKLKLTPIPAASQLDLSSWFVAGYSGGDIYHSLSRARPRWFMWCLLLLSVGVGIYLLPNR

SEQ ID NO: 492 - protein, 591 aa, Artificial Sequence
  Synthetic peptide
SMSYTWTGALITPCAAEETKLPINALSNSLLRHHNLVYATTSRSASLRQKKVTFDRLQVLDDHYRDVLKEMKAKASTVKAKLLSVEEACKLTPPHSARSKFGYGAKDVRNLSSKAVNHIRSVWKDLLEDTETPIDTTIMAKNEVFCVQPEKGGRKPARLIVFPDLGVRVCEKMALYDVVSTLPQAVMGSSYGFQYSPGQRVEFLVNAWKAKKCPMGFAYDTRCFDSTVTENDIRVEESIYQCCDLAPEARQAIRSLTERLYIGGPLTNSKGQNCGYRRCRASGVLTTSCGNTLTCYLKAAAACRAAKLQDCTMLVCGDDLVVICESAGTQEDEASLRAFTEAMTRYSAPPGDPPKPEYDLELITSCSSNVSVAHDASGKRVYYLTRDPTTPLARAAWETARHTPVNSWLGNIIMYAPTPWARMILMTHFFSILLAQEQLEKTLDCQIYGACYSIEPLDLPQIIQRLHGLSAFSLHSYSPGEDNRVSSCLRKLGIPPLRVWRHRARSVRARLLSQGGRAATCGKYLFNWAVRTKLKLTPIPAASQLDLSSWFVAGYSGGDIYHSLSRARPRWFMWCLLLLSVGVGIYLLPNR

SEQ ID NO: 493 - protein, 591 aa, Artificial Sequence
  Synthetic peptide
SMSYTWTGALITPCAAEETKLPINALSNSLLRHHNLVYATTSRSASLRQKKVTFDRLQVLDDHYRDVLKEMKAKASTVKAKLLSVEEACKLTPPHSARSKFGYGAKDVRNLSSKAVNHIRSVWKDLLEDTETPIDTTIMAKNEVFCVQPEKGGRKPARLIVFPDLGVRVCEKMALYDVVSTLPQAVMGSSYGFQYSPGQRVEFLVNAWKAKKCPMGFAYDTRCFDSTVTENDIRVEESIYQCCDLAPEARQAIRSLTERLYIGGPLTNSKGQNCGYRRCRASGVLTTSCGNTLTCYLKAAAACRAAKLQDCTMLVCGDDLVVICESAGTQEDEASLRAFTEAMTRYSAPPGDPPKPEYDLELITSCSSNVSVAHDASGKRVYYLTRDPTTPLARAAWETARHTPVNSWLGNIIMYAPTPWARAILMTHFFSILLAQEQLEKTLDCQIYGACYSIEPLDLPQIIQRLHGLSAFSLHSYSPGEDNRVASCLRKLGVPPLRVWRHRARSVRARLLSQGGRAATCGKYLFNWAVRTKLKLTPIPAASQLDLSSWFVAGYSGGDIYHSLSRARPRWFMWCLLLLSVGVGIYLLPNR

SEQ ID NO: 494 - protein, 591 aa, Artificial Sequence
  Synthetic peptide
SMSYTWTGALITPCAAEETKLPINALSNSLLRHHNLVYATTSRSASLRQKKVTFDRLQVLDDHYRDVLKEMKAKASTVKAKLLSVEEACKLTPPHSARSKFGYGAKDVRNLSSKAVNHIRSVWKDLLEDTETPIDTTIMAKNEVFCVQPEKGGRKPARLIVFPDLGVRVCEKMALYDVVSTLPQAVMGSSYGFQYSPGQRVEFLVNAWKAKKCPMGFAYDTRCFDSTVTENDIRVEESIYQCCDLAPEARQAIRSLTERLYIGGPLTNSKGQNCGYRRCRASGVLTTSCGNTLTCYLKAAAACRAAKLQDCTMLVCGDDLVVICESAGTQEDEASLRAFTEAMTRYSAPPGDPPKPEYDLELITSCSSNVSVAHDASGKRVYYLTRDPTTPLARAAWETARHTPVNSWLGNIIMYAPTPWARAILMTHFFSILLAQEQLEKTLDCQIYGACYSIEPLDLPQIIQRLHGLSAFSLHSYSPGEDNRVVSCLRKLGVPPLRVWRHRARSVRARLLSQGGRAATCGKYLFNWAVRTKLKLTPIPAASQLDLSSWFVAGYSGGDIYHSLSRARPRWFMWCLLLLSVGVGIYLLPNR

SEQ ID NO: 495 - protein, 591 aa, Artificial Sequence; identical to SEQ ID NO: 494
  Synthetic peptide

SEQ ID NO: 496 - protein, 591 aa, Artificial Sequence
  Synthetic peptid
SMSYTWTGALITPCAAEETKLPINALSNSLLRHHNLVYATTSRSASLRQKKVTFDRLQVLDDHYRDVLKEMKAKASTVKAKLLSVEEACKLTPPHSARSKFGYGAKDVRNLSSKAVNHIRSVWKDLLEDTETPIDTTIMAKNEVFCVQPEKGGRKPARLIVFPDLGVRVCEKMALYDVVSTLPQAVMGSSYGFQYSPGQRVEFLVNAWKAKKCPMGFAYDTRCFDSTVTENDIRVEESIYQCCDLAPEARQAIRSLTERLYIGGPLTNSKGQNCGYRRCRASGVLTTSCGNTLTCYLKAAAACRAAKLQDCTMLVCGDDLVVICESAGTQEDEASLRAFTEAMTRYSAPPGDPPKPEYDLELITSCSSNVSVAHDASGKRVYYLTRDPTTPLARAAWETARHTPVNSWLGNIIMYAPTPWARAILMTHFFSILLAQEQLEKTLDCQIYGACYSIEPLDLPQIIQRLHGLSAFSLHSYSPGEDNRVTSCLRKLGVPPLRVWRHRARSVRARLLSQGGRAATCGKYLFNWAVRTKLKLTPIPAASQLDLSSWFVAGYSGGDIYHSLSRARPRWFMWCLLLLSVGVGIYLLPNR

SEQ ID NO: 497 - protein, 591 aa, Artificial Sequence
  Synthetic peptide
SMSYTWTGALITPCAAEETKLPINALSNSLLRHHNLVYATTSRSASLRQKKVTFDRLQVLDDHYRDVLKEMKAKASTVKAKLLSVEEACKLTPPHSARSKFGYGAKDVRNLSSKAVNHIRSVWKDLLEDTETPIDTTIMAKNEVFCVQPEKGGRKPARLIVFPDLGVRVCEKMALYDVVSTLPQAVMGSSYGFQYSPGQRVEFLVNAWKAKKCPMGFAYDTRCFDSTVTENDIRVEESIYQCCDLAPEARQAIRSLTERLYIGGPLTNSKGQNCGYRRCRASGVLTTSCGNTLTCYLKAAAACRAAKLQDCTMLVCGDDLVVICESAGTQEDEASLRAFTEAMTRYSAPPGDPPKPEYDLELITSCSSNVSVAHDASGKRVYYLTRDPTTPLARAAWETARHTPVNSWLGNIIMYAPTPWARAILMTHFFSILLAQEQLEKTLDCQIYGACYSIEPLDLPQIIQRLHGLSAFSLHSYSPGEDNRVSSCLRKLGVPPLRVWRHRARSVRARLLSQGGRAATCGKYLFNWAVRTKLKLTPIPAASQLDLSSWFVAGYSGGDIYHSLSRARPRWFMWCLLLLSVGVGIYLLPNR

SEQ ID NO: 498 - protein, 591 aa, Artificial Sequence
  Synthetic peptide
SMSYTWTGALITPCAAEETKLPINALSNSLLRHHNLVYATTSRSASLRQKKVTFDRLQVLDDHYRDVLKEMKAKASTVKAKLLSVEEACKLTPPHSARSKFGYGAKDVRNLSSKAVNHIRSVWKDLLEDTETPIDTTIMAKNEVFCVQPEKGGRKPARLIVFPDLGVRVCEKMALYDVVSTLPQAVMGSSYGFQYSPGQRVEFLVNAWKAKKCPMGFAYDTRCFDSTVTENDIRVEESIYQCCDLAPEARQAIRSLTERLYIGGPLTNSKGQNCGYRRCRASGVLTTSCGNTLTCYLKAAAACRAAKLQDCTMLVCGDDLVVICESAGTQEDEASLRAFTEAMTRYSAPPGDPPKPEYDLELITSCSSNVSVAHDASGKRVYYLTRDPTTPLARAAWETARHTPVNSWLGNIIMYAPTPWARAILMTHFFSILLAQEQLEKTLDCQIYGACYSIEPLDLPQIIQRLHGLSAFSLHSYSPGEDNRVASCLRKLGIPPLRVWRHRARSVRARLLSQGGRAATCGKYLFNWAVRTKLKLTPIPAASQLDLSSWFVAGYSGGDIYHSLSRARPRWFMWCLLLLSVGVGIYLLPNR

SEQ ID NO: 499 - protein, 591 aa, Artificial Sequence
  Synthetic peptide
SMSYTWTGALITPCAAEETKLPINALSNSLLRHHNLVYATTSRSASLRQKKVTFDRLQVLDDHYRDVLKEMKAKASTVKAKLLSVEEACKLTPPHSARSKFGYGAKDVRNLSSKAVNHIRSVWKDLLEDTETPIDTTIMAKNEVFCVQPEKGGRKPARLIVFPDLGVRVCEKMALYDVVSTLPQAVMGSSYGFQYSPGQRVEFLVNAWKAKKCPMGFAYDTRCFDSTVTENDIRVEESIYQCCDLAPEARQAIRSLTERLYIGGPLTNSKGQNCGYRRCRASGVLTTSCGNTLTCYLKAAAACRAAKLQDCTMLVCGDDLVVICESAGTQEDEASLRAFTEAMTRYSAPPGDPPKPEYDLELITSCSSNVSVAHDASGKRVYYLTRDPTTPLARAAWETARHTPVNSWLGNIIMYAPTPWARAILMTHFFSILLAQEQLEKTLDCQIYGACYSIEPLDLPQIIQRLHGLSAFSLHSYSPGEDNRVVSCLRKLGIPPLRVWRHRARSVRARLLSQGGRAATCGKYLFNWAVRTKLKLTPIPAASQLDLSSWFVAGYSGGDIYHSLSRARPRWFMWCLLLLSVGVGIYLLPNR

SEQ ID NO: 500 - protein, 591 aa, Artificial Sequence
  Synthetic peptide
SMSYTWTGALITPCAAEETKLPINALSNSLLRHHNLVYATTSRSASLRQKKVTFDRLQVLDDHYRDVLKEMKAKASTVKAKLLSVEEACKLTPPHSARSKFGYGAKDVRNLSSKAVNHIRSVWKDLLEDTETPIDTTIMAKNEVFCVQPEKGGRKPARLIVFPDLGVRVCEKMALYDVVSTLPQAVMGSSYGFQYSPGQRVEFLVNAWKAKKCPMGFAYDTRCFDSTVTENDIRVEESIYQCCDLAPEARQAIRSLTERLYIGGPLTNSKGQNCGYRRCRASGVLTTSCGNTLTCYLKAAAACRAAKLQDCTMLVCGDDLVVICESAGTQEDEASLRAFTEAMTRYSAPPGDPPKPEYDLELITSCSSNVSVAHDASGKRVYYLTRDPTTPLARAAWETARHTPVNSWLGNIIMYAPTPWARAILMTHFFSILLAQEQLEKTLDCQIYGACYSIEPLDLPQIIQRLHGLSAFSLHSYSPGEDNRVISCLRKLGIPPLRVWRHRARSVRARLLSQGGRAATCGKYLFNWAVRTKLKLTPIPAASQLDLSSWFVAGYSGGDIYHSLSRARPRWFMWCLLLLSVGVGIYLLPNR

SEQ ID NO: 501 - protein, 591 aa, Artificial Sequence
  Synthetic peptide
SMSYTWTGALITPCAAEETKLPINALSNSLLRHHNLVYATTSRSASLRQKKVTFDRLQVLDDHYRDVLKEMKAKASTVKAKLLSVEEACKLTPPHSARSKFGYGAKDVRNLSSKAVNHIRSVWKDLLEDTETPIDTTIMAKNEVFCVQPEKGGRKPARLIVFPDLGVRVCEKMALYDVVSTLPQAVMGSSYGFQYSPGQRVEFLVNAWKAKKCPMGFAYDTRCFDSTVTENDIRVEESIYQCCDLAPEARQAIRSLTERLYIGGPLTNSKGQNCGYRRCRASGVLTTSCGNTLTCYLKAAAACRAAKLQDCTMLVCGDDLVVICESAGTQEDEASLRAFTEAMTRYSAPPGDPPKPEYDLELITSCSSNVSVAHDASGKRVYYLTRDPTTPLARAAWETARHTPVNSWLGNIIMYAPTPWARAILMTHFFSILLAQEQLEKTLDCQIYGACYSIEPLDLPQIIQRLHGLSAFSLHSYSPGEDNRVTSCLRKLGIPPLRVWRHRARSVRARLLSQGGRAATCGKYLFNWAVRTKLKLTPIPAASQLDLSSWFVAGYSGGDIYHSLSRARPRWFMWCLLLLSVGVGIYLLPNR

SEQ ID NO: 502 - protein, 591 aa, Artificial Sequence
  Synthetic peptide
SMSYTWTGALITPCAAEETKLPINALSNSLLRHHNLVYATTSRSASLRQKKVTFDRLQVLDDHYRDVLKEMKAKASTVKAKLLSVEEACKLTPPHSARSKFGYGAKDVRNLSSKAVNHIRSVWKDLLEDTETPIDTTIMAKNEVFCVQPEKGGRKPARLIVFPDLGVRVCEKMALYDVVSTLPQAVMGSSYGFQYSPGQRVEFLVNAWKAKKCPMGFAYDTRCFDSTVTENDIRVEESIYQCCDLAPEARQAIRSLTERLYIGGPLTNSKGQNCGYRRCRASGVLTTSCGNTLTCYLKAAAACRAAKLQDCTMLVCGDDLVVICESAGTQEDEASLRAFTEAMTRYSAPPGDPPKPEYDLELITSCSSNVSVAHDASGKRVYYLTRDPTTPLARAAWETARHTPVNSWLGNIIMYAPTPWARAILMTHFFSILLAQEQLEKTLDCQIYGACYSIEPLDLPQIIQRLHGLSAFSLHSYSPGEDNRVSSCLRKLGIPPLRVWRHRARSVRARLLSQGGRAATCGKYLFNWAVRTKLKLTPIPAASQLDLSSWFVAGYSGGDIYHSLSRARPRWFMWCLLLLSVGVGIYLLPNR

SEQ ID NO: 503 - protein, 4 aa, Artificial Sequence
  Synthetic peptide
SMSY

SEQ ID NO: 504 - DNA, 50 bp, Artificial Sequence
  Synthetic primer
gctagggctagccaccaccaccaccaccactcaatgtcttactcttggac

SEQ ID NO: 505 - DNA, 36 bp, Artificial Sequence
  Synthetic primer
ctcgacctcgagtcagcggggccgggcatgagacac

SEQ ID NO: 506 - DNA, 44 bp, Artificial Sequence
  Synthetic peptide
cagcataagcttcgtaatacgactcactatagccagccccctga

SEQ ID NO: 507 - DNA, 20 bp, Artificial Sequence
  Synthetic primer
cactcgcaagcaccctatca

SEQ ID NO: 508 - DNA, 21 bp, Artificial Sequence
  Synthetic primer
gttcgtgtgtgcgagaaaatg

SEQ ID NO: 509 - protein, 22 aa, Artificial Sequence
  Synthetic primer
GAGGATGGCCTATTGGCCTGGA

SEQ ID NO: 510 - DNA, 21 bp, Artificial Sequence
  Synthetic primer
cccgaagccagacaggccata

SEQ ID NO: 511 - DNA, 22 bp, Artificial Sequence
  Synthetic primer
cgtgcgcgtgtgcgagaagatg

SEQ ID NO: 512 - DNA, 25 bp, Artificial Sequence
  Synthetic primer
aagaggccggagtgtttaccccaac

SEQ ID NO: 513 - DNA, 24 bp, Artificial Sequence
  Synthetic primer
tcatcggttggggaggaggtagat

SEQ ID NO: 514 - protein, 555 aa, Hepatitis C virus
SMSYSWTGALVTPCAAEEQKLPINALSNSLLRHHNLVYSTTSRSACQRQKKVTFDRLQVLDSHYQDVLKEVKAAASKVKANLLSVEEACSLTPPHSAKSKFGYGAKDVRCHARKAVAHINSVWKDLLEDSVTPIDTTIMAKNEVFCVQPEKGGRKPARLIVFPDLGVRVCEKMALYDVVSKLPLAVMGSSYGFQYSPGQRVEFLVQAWKSKKTPMGFSYDTRCFDSTVTESDIRTEEAIYQCCDLDPQARVAIKSLTERLYVGGPLTNSRGENCGYRRCRASGVLTTSCGNTLTCYIKARAACRAAGLQDCTMLVCGDDLVVICESAGVQEDAASLRAFTEAMTRYSAPPGDPPQPEYDLELITSCSSNVSVAHDGAGKRVYYLTRDPTTPLARAAWETARHTPVNSWLGNIIMFAPTLWARMILMTHFFSVLIARDQLEQALNCEIYGACYSIEPLDLPPIIQRLHGLSAFSLHSYSPGEINRVAACLRKLGVPPLRAWRHRARSVRARLLSRGGRAAICGKYLFNWAVRTKLKLTPIAAAGRLDLSGWFTAGY

SEQ ID NO: 515 - DNA, 1665 bp, Hepatitis C virus
tcaatgtcttattcctggacaggcgcactcgtcaccccgtgcgctgcggaagaacaaaaactgcccatcaacgcactgagcaactcgttgctacgccatcacaatctggtgtattccaccacttcacgcagtgcttgccaaaggcagaagaaagtcacatttgacagactgcaagttctggacagccattaccaggacgtgctcaaggaggtcaaagcagcggcgtcaaaagtgaaggctaacttgctatccgtagaggaagcttgcagcctgacgcccccacattcagccaaatccaagtttggctatggggcaaaagacgtccgttgccatgccagaaaggccgtagcccacatcaactccgtgtggaaagaccttctggaagacagtgtaacaccaatagacactaccatcatggccaagaacgaggttttctgcgttcagcctgagaaggggggtcgtaagccagctcgtctcatcgtgttccccgacctgggcgtgcgcgtgtgcgagaagatggccctgtacgacgtggttagcaagctccccctggccgtgatgggaagctcctacggattccaatactcaccaggacagcgggttgaattcctcgtgcaagcgtggaagtccaagaagaccccgatggggttctcgtatgatacccgctgttttgactccacagtcactgagagcgacatccgtacggaggaggcaatttaccaatgttgtgacctggacccccaagcccgcgtggccatcaagtccctcactgagaggctttatgttgggggccctcttaccaattcaaggggggaaaactgcggctaccgcaggtgccgcgcgagcggcgtactgacaactagctgtggtaacaccctcacttgctacatcaaggcccgggcagcctgtcgagccgcagggctccaggactgcaccatgctcgtgtgtggcgacgacttagtcgttatctgtgaaagtgcgggggtccaggaggacgcggcgagcctgagagccttcacggaggctatgaccaggtactccgccccccccggggaccccccacaaccagaatacgacttggagcttataacatcatgctcctccaacgtgtcagtcgcccacgacggcgctggaaagagggtctactaccttacccgtgaccctacaacccccctcgcgagagccgcgtgggagacagcaagacacactccagtcaattcctggctaggcaacataatcatgtttgcccccacactgtgggcgaggatgatactgatgacccatttctttagcgtcctcatagccagggatcagcttgaacaggctcttaactgtgagatctacggagcctgctactccatagaaccactggatctacctccaatcattcaaagactccatggcctcagcgcattttcactccacagttactctccaggtgaaatcaatagggtggccgcatgcctcagaaaacttggggtcccgcccttgcgagcttggagacaccgggcccggagcgtccgcgctaggcttctgtccagaggaggcagggctgccatatgtggcaagtacctcttcaactgggcagtaagaacaaagctcaaactcactccaatagcggccgctggccggctggacttgtccggttggttcacggctggctat

SEQ ID NO: 516 - protein, 591 aa, Hepatitis C virus
  MOD_RES (419)..(419): Xaa is Leu, Ile, Val, or Pro
  MOD_RES (482)..(482): Xaa is Ile, Ala, Val, or Asp
  MOD_RES (486)..(486): Xaa is Ala, Val, Ile, Thr, or Ser
  MOD_RES (494)..(494): Xaa is Val, or Ile
SMSYTWTGALITPCAAEETKLPINALSNSLLRHHNLVYATTSRSASLRQKKVTFDRLQVLDDHYRDVLKEMKAKASTVKAKLLSVEEACKLTPPHSARSKFGYGAKDVRNLSSKAVNHIRSVWKDLLEDTETPIDTTIMAKNEVFCVQPEKGGRKPARLIVFPDLGVRVCEKMALYDVVSTLPQAVMGSSYGFQYSPGQRVEFLVNAWKAKKCPMGFAYDTRCFDSTVTENDIRVEESIYQCCDLAPEARQAIRSLTERLYIGGPLTNSKGQNCGYRRCRASGVLTTSCGNTLTCYLKAAAACRAAKLQDCTMLVCGDDLVVICESAGTQEDEASLRAFTEAMTRYSAPPGDPPKPEYDLELITSCSSNVSVAHDASGKRVYYLTRDPTTPLARAAWETARHTPVNSWLGNIIMYAPTXWARMILMTHFFSILLAQEQLEKTLDCQIYGACYSIEPLDLPQIIQRLHGLSAFSLHSYSPGEXNRVXSCLRKLGXPPLRVWRHRARSVRARLLSQGGRAATCGKYLFNWAVRTKLKLTPIPAASQLDLSSWFVAGYSGGDIYHSLSRARPRWFMWCLLLLSVGVGIYLLPNR

1. An isolated polypeptide comprising an amino acid sequence comprising at least one variation from SEQ ID NO: 1, the at least one variation selected from the group consisting of
cysteine, isoleucine, valine, or proline at amino acid position 419;
alanine, valine, or asparagine at amino acid position 482;
valine, isoleucine, threonine, or serine at amino acid position 486; and
isoleucine at amino acid position 494,
as the amino acid positions are defined in SEQ ID NO: 1, wherein the polypeptide has Hepatitis C Virus (HCV) NS5B polymerase activity.

2.-3. (canceled)

4. The isolated polypeptide of claim 1 comprising an amino acid sequence at least 90% identical to SEQ ID NO: 1.

5.-7. (canceled)

8. The isolated polypeptide of claim 1, wherein the amino acid residue of the polypeptide corresponding to amino acid 419 of SEQ ID NO: 1 is cysteine, isoleucine, valine, or proline.

9. The isolated polypeptide of claim 1, wherein the amino acid residue of the polypeptide corresponding to amino acid 482 of SEQ ID NO: 1 is alanine, valine, or asparagine.

10. The isolated polypeptide of claim 1, wherein the amino acid residue of the polypeptide corresponding to amino acid 486 of SEQ ID NO: 1 is valine, isoleucine, threonine, or serine.

11. The isolated polypeptide of claim 1, wherein the amino acid residue of the polypeptide corresponding to amino acid 494 of SEQ ID NO: 1 is isoleucine.

12.-20. (canceled)

21. An isolated polypeptide comprising an amino acid sequence at least 90% identical to the amino acid sequence of SEQ ID NO: 516 or at least 90% identical to a portion of SEQ ID NO: 516 having Hepatitis C Virus (HCV) NS5B polymerase activity, with the proviso that at least one of the amino acids of the polypeptide that correspond to positions 419, 482, 486, and/or 494 of SEQ ID NO: 516 is identical to the corresponding amino acid(s) of SEQ ID NO: 516.

22. The isolated polypeptide of claim 21, wherein the amino acid residue of the polypeptide corresponding to amino acid 419 of SEQ ID NO: 3 is cysteine, isoleucine, valine, or proline.

23. The isolated polypeptide of claim 21, wherein the amino acid residue of the polypeptide corresponding to amino acid 482 of SEQ ID NO: 3 is alanine, threonine, valine, or asparagine.

24. The isolated polypeptide of claim 21, wherein the amino acid residue of the polypeptide corresponding to amino acid 486 of SEQ ID NO: 3 is valine, isoleucine, threonine, or serine.

25. The isolated polypeptide of claim 21, wherein the amino acid residue of the polypeptide corresponding to amino acid 494 of SEQ ID NO: 3 is isoleucine.

26.-35. (canceled)

36. The isolated polypeptide of claim 1 fused to a heterologous peptide.

37. (canceled)

38. An isolated peptide having no more than 50 amino acids and comprising a sequence of 6-50 amino acids that is at least 90% identical to a portion of the amino acid sequence of SEQ ID NO: 516 encompassing at least one of amino acid residues 419, 482, 486, and 494, with the proviso that, when present, at least one of the amino acids of the polypeptide that corresponds to positions 419, 482, 486, and/or 494 of SEQ ID NO: 516 is identical to the corresponding amino acid(s) of SEQ ID NO: 516.

39.-41. (canceled)

42. An isolated polypeptide comprising at least one of the amino acid sequences selected from the group consisting of SEQ ID NOs: 4-502.

43. An isolated antibody or fragment thereof that specifically binds the polypeptide of claim 1.

44.-47. (canceled)

48. An isolated polynucleotide comprising a nucleotide sequence encoding the polypeptide of claim 1.

49.-53. (canceled)

54. An isolated polynucleotide comprising a nucleotide sequence that encodes at least one of the amino acid sequences selected from the group consisting of SEQ ID NOs: 4-502.

55.-59. (canceled)

60. An expression vector comprising the polynucleotide of claim 54.

61.-63. (canceled)

64. An isolated cell comprising the expression vector of claim 60.

65. (canceled)

66. An isolated cell transformed or transfected with a polynucleotide according to claim 48, wherein the cell expresses a polypeptide encoding by the polynucleotide, and wherein the cell is free of HCV infection.

67.-68. (canceled)

69. An assay mixture comprising an isolated polypeptide according to claim 1, an isolated RNA template, an RNA primer, nucleotide triphosphates, and buffer.

70. A method for characterizing the HCV inhibitory activity of an agent, the method comprising performing an HCV NS5B polymerase reaction with the polypeptide of claim 1 in the presence of an agent, and comparing polymerase activity in the presence of the agent with polymerase activity of the polypeptide in the absence of the agent.

71.-72. (canceled)

73. A method for detecting the presence of drug-resistant HCV in a sample comprising HCV, wherein the method comprises determining the presence or absence of an HCV NS5B polypeptide with an amino acid sequence in which at least one amino acid that corresponds to positions 419, 482, 486, and/or 494 of SEQ ID NO: 516 is identical to the corresponding amino acid(s) of SEQ ID NO: 516, wherein the presence of the at least one amino acid in the HCV NS5B protein indicates the presence of drug-resistant HCV.

74. The method of claim 73, wherein determining the presence or absence of the polypeptide comprises contacting the sample with an antibody or fragment thereof that specifically binds said polypeptide and detecting binding of the antibody or fragment thereof to the polypeptide.

75. A method for detecting the presence of drug-resistant HCV in a sample, wherein the method comprises determining the presence or absence of a polynucleotide in the sample, the polynucleotide comprising a nucleic acid sequence encoding HCV NS5B polymerase containing at least one codon selected from the group consisting of
a codon encoding cysteine, isoleucine, valine, or proline at a position corresponding to codon position 419 of SEQ ID NO: 2;
a codon encoding alanine, valine, or asparagine at a position corresponding to codon position 482 of SEQ ID NO: 2;
a codon encoding valine, isoleucine, or serine at a position corresponding to codon position 486 of SEQ ID NO: 2; and
a codon encoding isoleucine at a position corresponding to codon position 494 of SEQ ID NO: 2,
wherein the presence of the at least one codon indicates the presence of drug-resistant HCV in the sample.

76. The method of claim 75, wherein the method comprises
contacting polynucleotides in the sample with a nucleic acid probe, under conditions allowing sequence-specific hybridization of the nucleic acid probe with a target sequence, wherein hybridization of the nucleic acid probe to a polynucleotide in the sample indicates the presence of drug-resistant HCV in the sample, wherein the nucleic acid probe comprises nucleotide sequence of 14-50 nucleotides complementary to a continuous portion of a nucleotide sequence of a of nucleotide encoding a polypeptide having HCV NS5B polymerase activity, the nucleotide having at least one codon variation of SEQ ID NO: 2 selected from the group consisting of a codon encoding cysteine, isoleucine, valine, or proline at codon 419; a codon encoding alanine, valine, or asparagine at codon 482; a codon encoding valine, isoleucine, threonine, or serine at codon 486; and a codon encoding isoleucine at codon 494, as the codon positions are defined in SEQ ID NO: 2, the portion including at least one codon at a codon position selected from codon positions 419, 482, 486, and 494 of SEQ ID NO: 2.

77. (canceled)

78. A method for determining whether an HCV-infected patient is infected with an HCV strain that has a decreased sensitivity to VX-222, the method comprising determining the presence or absence of a polypeptide in a biological sample from the patient, the polypeptide comprising an amino acid sequence comprising at least one variation from SEQ ID NO: 1, the at least one variation selected from the group consisting of
cysteine, isoleucine, methionine, serine, valine, or proline at amino acid position 419;
lysine at amino acid position 422;
alanine, isoleucine, threonine, or valine at amino acid position 423;
alanine, leucine, threonine, valine, or asparagine at amino acid position 482;
valine, isoleucine, threonine, or serine at amino acid position 486; and
isoleucine or alanine at amino acid position 494,
as the amino acid positions are defined in SEQ ID NO: 1, wherein the presence of the polypeptide indicates infection with an HCV strain that has a decreased sensitivity to VX-222.

79. The method of claim 78, wherein determining the presence or absence of the polypeptide comprises contacting the sample with an antibody or fragment thereof that specifically binds said polypeptide and detecting binding of the antibody or fragment thereof to the polypeptide.

80. A method for identifying an agent able to rescue the polymerase-inhibitor activity of VX-222 against an HCV NS5B polymerase having resistance to VX-222, the method comprising:
a) performing an HCV NS5B polymerase reaction with a polypeptide comprising an amino acid sequence comprising at least one variation from SEQ ID NO: 1, the at least one variation selected from the group consisting of
cysteine, isoleucine, methionine, serine, valine, or proline at amino acid position 419;
lysine at amino acid position 422;
alanine, isoleucine, threonine, or valine at amino acid position 423;
alanine, leucine, threonine, valine, or asparagine at amino acid position 482;
valine, isoleucine, threonine, or serine at amino acid position 486; and
isoleucine or alanine at amino acid position 494,
as the amino acid positions are defined in SEQ ID NO: 1, in the presence of an agent and VX-222; and
b) comparing polymerase activity of the polypeptide in the presence of the agent with polymerase activity of the polypeptide in the absence of the agent, wherein a decrease in HCV polymerase activity in the presence of the agent is indicative of the ability to rescue the polymerase-inhibitory activity of VX-222 against an HCV NSSB polymerase having resistance to VX-222.

81. (canceled)

82. A method for determining whether an HCV-infected patient is infected with an HCV strain that has a decreased sensitivity to VX-222, the method comprising determining the presence or absence of a polynucleotide in a biological sample from the patient, the polynucleotide comprising a nucleic acid sequence encoding HCV NS5B polymerase containing at least one codon selected from the group consisting of a codon encoding cysteine, isoleucine, methionine, serine, valine, or proline at a position corresponding to codon position 419 of SEQ ID NO: 2;
a codon encoding lysine at a position corresponding to codon position 422 of SEQ ID NO: 2;
a codon encoding alanine, isoleucine, threonine, or valine at a position corresponding to codon position 423 of SEQ ID NO: 2;
a codon encoding alanine, leucine, threonine, valine, or asparagine at a position corresponding to codon position 482 of SEQ ID NO: 2;
a codon encoding valine, isoleucine, threonine, or serine at a position corresponding to codon position 486 of SEQ ID NO: 2; and
a codon encoding isoleucine or alanine at a position corresponding to codon position 494 of SEQ ID NO: 2,
wherein the presence of the polynucleotide indicates infection with an HCV strain having a decreased sensitivity to VX-222.

83. (canceled)
